(19) United States
(12) Patent Application Publication
(10) Pub. No.: US 2023/0242946 A1
(43) Pub. Date: Aug. 3, 2023

(54) ENGINEERED ENONE REDUCTASE AND KETOREDUCTASE VARIANT ENZYMES

(71) Applicant: Codexis, Inc., Redwood City, CA (US)

(72) Inventors: Charlene Ching, San Jose, CA (US); David Elgart, San Mateo, CA (US); Stephan Jenne, Foster City, CA (US); Larson Lyle Matzdorff, San Francisco, CA (US); Jovana Nazor, Milpitas, CA (US); Marcus Rohovie, Redwood City, CA (US); Zara Maxine Seibel, San Francisco, CA (US)

(21) Appl. No.: 18/163,132

(22) Filed: Feb. 1, 2023

Related U.S. Application Data
(60) Provisional application No. 63/306,265, filed on Feb. 3, 2022.

(51) Int. Cl. C12P 7/22; C12N 9/04; C12N 9/02; C12N 15/70

(52) U.S. Cl. CPC C12P 7/22; C12N 9/0006; C12N 9/001; C12N 15/70; C12Y 101/01184; C12Y 103/01031

(57) ABSTRACT

The present disclosure provides engineered enone reductase enzymes (EREDs), polypeptides having ERED activity, and polynucleotides encoding these enzymes, as well as vectors and host cells comprising these polynucleotides and polypeptides. Methods for producing ERED enzymes are also provided. The present disclosure also provides engineered ketoreductase enzymes (KREDs), polypeptides having KRED activity, and polynucleotides encoding these enzymes, as well as vectors and host cells comprising these polynucleotides and polypeptides. Methods for producing KRED enzymes are also provided. The present disclosure further provides compositions comprising the ERED and KRED enzymes and methods of using the engineered ERED and KRED enzymes. The present disclosure finds particular use in the production of pharmaceutical compounds.

[0001] The present application claims priority to U.S. Prov. Pat. Appln. Ser. No. 63/306,265, filed Feb. 3, 2022, which is hereby incorporated by reference in its entirety for all purposes.

### FIELD OF THE INVENTION

[0002] The present disclosure provides engineered enone reductase enzymes (EREDs), polypeptides having ERED activity, and polynucleotides encoding these enzymes, as well as vectors and host cells comprising these polynucleotides and polypeptides. Methods for producing ERED enzymes are also provided. The present disclosure also provides engineered ketoreductase enzymes (KREDs), polypeptides having KRED activity, and polynucleotides encoding these enzymes, as well as vectors and host cells comprising these polynucleotides and polypeptides. Methods for producing KRED enzymes are also provided. The present disclosure further provides compositions comprising the ERED and KRED enzymes and methods of using the engineered ERED and KRED enzymes. The present disclosure finds particular use in the production of pharmaceutical compounds.

### REFERENCE TO SEQUENCE LISTING, TABLE OR COMPUTER PROGRAM

[0003] The official copy of the Sequence Listing is submitted concurrently with the specification as an XML file, with a file name of “CX2-225US1 EREDs KREDs ST26.xml”, a creation date of Jan. 31, 2023, and a size of 1.00 megabyte. The Sequence Listing filed is part of the specification and incorporated in its entirety by reference herein.

### BACKGROUND OF THE INVENTION

[0004] Enone reductase enzymes (EREDs) of the Old Yellow Enzyme (OYE) family catalyze a range of reductions of α,β unsaturated ketones, aldehydes, esters, and nitriles that are of potential industrial importance. One reaction of interest is the hydrogenation of nitroalkenes, which is present in certain industrial explosives and serves as intermediates for the synthesis of a range of compounds, such as alkaloids, antibiotics, and biocides. Accumulation of the nitronate can be enhanced by a Y196F mutation of OYE (Meah and Massey, 2000, Proc Natl Acad Sci USA 97(20):10733-8; Meah et al., 2001, Proc Natl Acad Sci USA 98(15):8560-5), providing an attractive biocatalytic based production of a nitronate and a useful alternative to the more complex chemical transformation needed to provide the same products.

[0005] Another useful reaction carried out by enone reductases is the reduction of 3,5,5-trimethyl-2-cyclohexene-1,4-dione to produce (6R)-2,2,6-trimethylcyclohexane-1,4-dione, also known as levodione, which is a useful chiral building block for synthesis of naturally occurring optically active carotenoid compounds, such as xanthoxin and zeaxanthin. Old Yellow Enzymes OYE1, OYEZ and OYE3 from yeast Saccharomyces pastorianus and Saccharomyces cerevisiae can also catalyze stereoselective reduction of α,β-unsaturated carbonyls, esters and nitriles. However, these enzymes can have a narrow substrate recognition profile and/or have stability properties that are not suited for commercial applications. Variants of a chimeric enzyme comprising OYE1, OYEZ, and OYE3 were previously described for the synthesis of olefin compounds (see U.S. Pat. No. 8,329,438).

[0006] Enzymes belonging to the ketoreductase (KRED) or carbonyl reductase class (EC1.1.1.184) are useful for the synthesis of optically active alcohols from the corresponding prochiral ketone substrate and by stereoselective reduction of corresponding racemic aldehyde substrates. KREDs typically convert ketone and aldehyde substrates to the corresponding alcohol product, but may also catalyze the reverse reaction, oxidation of an alcohol substrate to the corresponding ketone/aldehyde product. The reduction of ketones and aldehydes and the oxidation of alcohols by enzymes such as KRED requires a co-factor, most commonly reduced nicotinamide adenine dinucleotide (NADH) or reduced nicotinamide adenine dinucleotide phosphate (NADPH), and nicotinamide adenine dinucleotide (NAD) or nicotinamide adenine dinucleotide phosphate (NADP) for the oxidation reaction. NADH and NADPH serve as electron donors, while NAD and NADP serve as electron acceptors. It is frequently observed that ketoreductases and alcohol dehydrogenases accept either the phosphorylated or the non-phosphorylated co-factor (in its oxidized and reduced state), but most often not both.

[0007] KREDs can be found in a wide range of bacteria and yeasts, as known in the art (See e.g., Hummel and Kula Eur. J. Biochem., 184:1-13 [1989]). Numerous KRED genes and enzyme sequences have been reported, including those of Candida magnoliae (Genbank Acc. No. JC7338; GI:11360538); Candida parapsilosis (Genbank Acc. No. BAA24528.1; GI:2815409), Sporobolomyces salmonicolor (Genbank Acc. No. AF160799; GI:6539734), Lactobacillus kefir (Genbank Acc. No. AAP94029.1; GI: 33112056), Lactobacillus brevis (Genbank Acc. No. 1NXQ_A; GI: 30749782), and Thermoanaerobium brockii (Genbank Acc. No. P14941; GI: 1771790).

[0008] The stereo selectivity of ketoreductases have been applied to the preparation of important pharmaceutical building blocks (See e.g., Broussy et al., Org. Lett., 11:305-308 [2009]). Specific applications of naturally occurring or engineered KREDs in biocatalytic processes to generate useful chemical compounds have been demonstrated for reduction of 4-chloroacetoacetate esters (See e.g,. Zhou, J. Am. Chem. Soc., 105:5925-5926 [1983]; Santaniello, J. Chem. Res., (S) 132-133 [1984]; U.S. Pat. Nos. 5,559,030; 5,700,670; and 5,891,685), reduction of dioxocarboxylic acids (See e.g., U.S. Pat. No. 6,399,339), reduction of tert-butyl (S)-chloro-5-hydroxy-3-oxohexanoate (See e.g., U.S. Pat. No. 6,645,746; and WO 01/40450), reduction pyrrolotriazine-based compounds (See e.g., U.S. Appln. Publ. No. 2006/0286646); reduction of substituted acetophenones (See e.g., U.S. Pat. Nos. 6,800,477 and 8,748,143); and reduction of ketothiolanes (WO 2005/054491).

[0009] Interest in replacing traditional chemical synthesis with biocatalytic routes has dramatically increased in recent years. Enzymatic synthesis or partial enzymatic synthesis has many advantages, including reduced toxic waste, more efficient synthetic routes, and milder industrial conditions. Multistep enzymatic cascades and one-pot reactions have also been employed to create complex intermediates and APIs, some with multiple chiral centers. Effective multistep cascades require multiple enzymes with improved properties as part of an optimized process. Thus, there is a need in the art for additional ERED and KRED enzymes with improved properties, particularly for use in synthetic cascades and one-pot systems.

### SUMMARY OF THE INVENTION

[0010] The present disclosure provides engineered ERED enzymes, polypeptides having ERED activity, and polynucleotides encoding these enzymes, as well as vectors and host cells comprising these polynucleotides and polypeptides. Methods for producing ERED enzymes are also provided. The present disclosure provides engineered KRED enzymes, polypeptides having KRED activity, and polynucleotides encoding these enzymes, as well as vectors and host cells comprising these polynucleotides and polypeptides. Methods for producing KRED enzymes are also provided. The present disclosure further provides compositions comprising the ERED and KRED enzymes and methods of using the engineered ERED and KRED enzymes. The present disclosure finds particular use in the production of pharmaceutical compounds.

[0011] The present disclosure provides engineered EREDs comprising polypeptide sequences having at least 85%, 86%, 87%, 88%, 89%, 90%, 91%, 92%, 93%, 94%, 95%, 96%, 97%, 98%, 99%, or more sequence identity to SEQ ID NOs: 10, 20, 162, 262, 282, 294, 322, and/or 346, or a functional fragment thereof, wherein said engineered ERED comprises a polypeptide comprising at least one substitution or substitution set in said polypeptide sequence, and wherein the amino acid positions of said polypeptide sequence are numbered with reference to SEQ ID NOs: 10, 20, 162, 262, 282, 294, 322, and/or 346. In some embodiments, the polypeptide sequence has at least 85%, 86%, 87%, 88%, 89%, 90%, 91%, 92%, 93%, 94%, 95%, 96%, 97%, 98%, 99%, or more sequence identity to SEQ ID NO: 10, and wherein the polypeptide sequence of the engineered ERED comprises at least one substitution or substitution set at one or more positions in said polypeptide sequence selected from 5, 10, 13, 18/103, 19/260/363/394, 30, 32/127/250/384, 44, 56, 92, 99, 100, 103, 103/154, 107, 109, 124, 149, 154, 156, 168, 169, 172, 183, 209, 250, 250/290/384, 250/309/384, 250/384, 279, 306, 307, 341, 359, 369, 394, 398, and 399, wherein the amino acid positions of said polypeptide sequence are numbered with reference to SEQ ID NO: 10. In some embodiments, the polypeptide sequence of the engineered ERED has at least 85%, 86%, 87%, 88%, 89%, 90%, 91%, 92%, 93%, 94%, 95%, 96%, 97%, 98%, 99%, or more sequence identity to SEQ ID NO: 10, and wherein the polypeptide sequence of the engineered ERED comprises at least one substitution or substitution set at one or more positions in said polypeptide sequence selected from 5Q, 5S, 10L, 13G, 18L/103G, 19K/260P/363K/394K, 30Y, 32V/127T/250T/384I, 44F, 44Y, 56M, 56Q, 92E, 99R, 100R, 103A, 103G, 103Q, 103R, 103R/154G, 103S, 103T, 107A, 107E, 107N, 107Q, 107R, 109G, 124S, 149F, 154R, 156G, 168A, 168G, 168Q, 169V, 172R, 183E, 183F, 183G, 183W, 209R, 250R, 250T/290K/384I, 250T/309S/384I, 250T/384I, 279L, 279Q, 306V, 307G, 341G, 359Q, 359R, 359V, 369A, 369E, 394A, 398E, 398G, 399E, 399G, and 399V, wherein the amino acid positions of said polypeptide sequence are numbered with reference to SEQ ID NO: 10. In some embodiments, the polypeptide sequence of the engineered ERED has at least 85%, 86%, 87%, 88%, 89%, 90%, 91%, 92%, 93%, 94%, 95%, 96%, 97%, 98%, 99%, or more sequence identity to SEQ ID NO: 10, and wherein the polypeptide sequence of the engineered ERED comprises at least one substitution or substitution set at one or more positions in said polypeptide sequence selected from K5Q, K5S, Q10L, R13G, F18L/L103G, E19K/T260P/E363K/D394K, H30Y, A32V/N127T/V250T/T384I, H44F, H44Y, V56M, V56Q, D92E, K99R, N100R, L103A, L103G, L103Q, L103R, L103R/K154G, L103S, L103T, D107A, D107E, D107N, D107Q, D107R, Q109G, F124S, E149F, K154R, N156G, K168A, K168G, K168Q, Q169V, K172R, A183E, A183F, A183G, A183W, N209R, V250R, V250T/E290K/T384I, V250T/T3095/T384I, V250T/T384I, A279L, A279Q, S306V, E307G, P341G, Y359Q, Y359R, Y359V, K369A, K369E, D394A, N398E, N398G, K399E, K399G, and K399V, wherein the amino acid positions of said polypeptide sequence are numbered with reference to SEQ ID NO: 10. In some embodiments, the engineered ERED comprises a polypeptide sequence having at least 85%, 86%, 87%, 88%, 89%, 90%, 91%, 92%, 93%, 94%, 95%, 96%, 97%, 98%, 99%, or more sequence identity to SEQ ID NO: 10.

[0012] In some embodiments, the present invention provides an engineered ERED having a polypeptide sequence having at least 85%, 86%, 87%, 88%, 89%, 90%, 91%, 92%, 93%, 94%, 95%, 96%, 97%, 98%, 99%, or more sequence identity to SEQ ID NO: 20, and wherein the polypeptide sequence of said engineered ERED comprises at least one substitution or substitution set at one or more positions in said polypeptide sequence selected from 32/44/103/107/124/127/150/250, 32/44/103/107/124/127/341/394, 32/44/107/124/127/150/183, 32/103/107/124, 32/103/107/124/127/150/250, 32/103/107/124/183/250, 32/103/107/124/209/250, 32/103/107/124/250/394, 32/103/109/154/168/183/341/398, 32/107/124/209/394, 32/124/127/250, 32/183, 32/183/341/399, 38, 40, 44/103/107/124/127, 44/103/107/124/127/183, 44/103/124/127/150/183/260, 44/103/124/250/394, 83, 103/107/124, 103/107/124/127/150, 103/107/124/209/394, 103/107/124/250, 114, 118, 124/150, 148, and 261, wherein the amino acid positions of said polypeptide sequence are numbered with reference to SEQ ID NO: 20. In some embodiments, the present invention provides an engineered ERED having a polypeptide sequence having at least 85%, 86%, 87%, 88%, 89%, 90%, 91%, 92%, 93%, 94%, 95%, 96%, 97%, 98%, 99%, or more sequence identity to SEQ ID NO: 20, and wherein the polypeptide sequence of said engineered ERED comprises at least one substitution or substitution set at one or more positions in said polypeptide sequence selected from 32A/44Y/103Q/107R/124S/127N/341G/394E, 32A/44Y/103T/107Q/124S/127N/150M/250R, 32A/44Y/107Q/124S/127N/150M/183E, 32A/103A/107Q/124S, 32A/103G/109G/154R/168Q/183G/341R/398E, 32A/103R/107E/124S/250R/394E, 32A/103R/107Q/124S/127N/150M/250R, 32A/103R/107R/124S/209R/250R, 32A/103T/107R/124S/183E/250R, 32A/107R/124S/209R/394E, 32A/124S/127N/250R, 32A/183G, 32A/183G/341R/399E, 38S, 40G, 44Y/103Q/107Q/124S/127N, 44Y/103Q/124S/127N/150M/183E/260P, 44Y/103R/107E/124S/127N/183E, 44Y/103T/124S/250R/394E, 83F, 83M, 83V, 103R/107E/124S/209R/394E, 103R/107Q/124S, 103R/107Q/124S/250R, 103R/107R/124S/127N/150M, 114M, 118A, 124S/150M, 148A, 148M, 148R, 261C, and 261S, wherein the amino acid positions of said polypeptide sequence are numbered with reference to SEQ ID NO: 20. In some embodiments, the present invention provides an engineered ERED having a polypeptide sequence having at least 85%, 86%, 87%, 88%, 89%, 90%, 91%, 92%, 93%, 94%, 95%, 96%, 97%, 98%, 99%, or more sequence identity to SEQ ID NO: 20, and wherein the polypeptide sequence of said engineered ERED comprises at least one substitution or substitution set at one or more positions in said polypeptide sequence selected from V32A/H44Y/L103Q/D107R/F124S/T127N/P341G/D394E, V32A/H44Y/L103T/D107Q/F124S/T127N/E150M/T250R, V32A/H44Y/D107Q/F124S/T127N/E150M/A183E, V32A/L103A/D107Q/F124S, V32A/L103G/Q109G/K154R/K168Q/A183G/P341R/N398E, V32A/L103R/D107E/F124S/T250R/D394E, V32A/L103R/D107Q/F124S/T127N/E150M/T250R, V32A/L103R/D107R/F124S/N209R/T250R, V32A/L103T/D107R/F124S/A183E/T250R, V32A/D107R/F124S/N209R/D394E, V32A/F124S/T127N/T250R, V32A/A183G, V32A/A183G/P341R/K399E, T38S, M40G, H44Y/L103Q/D107Q/F124S/T127N, H44Y/L103Q/F124S/T127N/E150M/A183E/T260P, H44Y/L103R/D107E/F124S/T127N/A183E, H44Y/L103T/F124S/T250R/D394E, Y83F, Y83M, Y83V, L103R/D107E/F124S/N209R/D394E, L103R/D107Q/F124S, L103R/D107Q/F124S/T250R, L103R/D107R/F124S/T127N/E150M, V114M, V118A, F124S/E150M, Q148A, Q148M, Q148R, G261C, and G261S, wherein the amino acid positions of said polypeptide sequence are numbered with reference to SEQ ID NO: 20. In some embodiments, the engineered ERED comprises a polypeptide sequence having at least 85%, 86%, 87%, 88%, 89%, 90%, 91%, 92%, 93%, 94%, 95%, 96%, 97%, 98%, 99%, or more sequence identity to SEQ ID NO: 20.

[0013] In some embodiments, the present invention provides an engineered ERED having a polypeptide sequence having at least 85%, 86%, 87%, 88%, 89%, 90%, 91%, 92%, 93%, 94%, 95%, 96%, 97%, 98%, 99%, or more sequence identity to SEQ ID NO: 162, and wherein the polypeptide sequence of said engineered ERED comprises at least one substitution or substitution set at one or more positions in said polypeptide sequence selected from 4, 7, 7/307, 56/378, 95, 100, 109, 127, 146/333, 161, 209, 209/378, 258, 297, 298, 299, 302, 306, 307, 333, 336, 341, 359, and 378, wherein the amino acid positions of said polypeptide sequence are numbered with reference to SEQ ID NO: 162. In some embodiments, the present invention provides an engineered ERED having a polypeptide sequence having at least 85%, 86%, 87%, 88%, 89%, 90%, 91%, 92%, 93%, 94%, 95%, 96%, 97%, 98%, 99%, or more sequence identity to SEQ ID NO: 162, and wherein the polypeptide sequence of said engineered ERED comprises at least one substitution or substitution set at one or more positions in said polypeptide sequence selected from 4S, 7G, 7G/307G, 56Y/378Q, 95I, 100E, 109G, 127V, 146P/333A, 161A, 209R, 209R/378E, 258K, 297F, 297W, 297Y, 298K, 299G, 302A, 306P, 307G, 307Q, 333T, 336G, 341G, 359E, 359T, 378G, 378P, 378R, and 378T, wherein the amino acid positions of said polypeptide sequence are numbered with reference to SEQ ID NO: 162. In some embodiments, the present invention provides an engineered ERED having a polypeptide sequence having at least 85%, 86%, 87%, 88%, 89%, 90%, 91%, 92%, 93%, 94%, 95%, 96%, 97%, 98%, 99%, or more sequence identity to SEQ ID NO: 162, and wherein the polypeptide sequence of said engineered ERED comprises at least one substitution or substitution set at one or more positions in said polypeptide sequence selected from V4S, F7G, F7G/E307G, V56Y/M378Q, V95I, N100E, Q109G, T127V, A146P/V333A, S161A, N209R, N209R/M378E, A258K, S297F, S297W, S297Y, L298K, V299G, E302A, 5306P, E307G, E307Q, V333T, E336G, P341G, Y359E, Y359T, M378G, M378P, M378R, and M378T, wherein the amino acid positions of said polypeptide sequence are numbered with reference to SEQ ID NO: 162. In some embodiments, the engineered ERED comprises a polypeptide sequence having at least 85%, 86%, 87%, 88%, 89%, 90%, 91%, 92%, 93%, 94%, 95%, 96%, 97%, 98%, 99%, or more sequence identity to SEQ ID NO: 162.

[0014] In some embodiments, the present invention provides an engineered ERED having a polypeptide sequence having at least 85%, 86%, 87%, 88%, 89%, 90%, 91%, 92%, 93%, 94%, 95%, 96%, 97%, 98%, 99%, or more sequence identity to SEQ ID NO: 262, and wherein the polypeptide sequence of said engineered ERED comprises at least one substitution or substitution set at one or more positions in said polypeptide sequence selected from 4/100/209/258/359/378, 4/151/307/378, 4/151/333, 4/151/359/378, 4/209/359, 4/209/359/378, 7/95/100, 95/100/326/333/378, 95/100/326/378, 95/258/378, 95/333, 100/146/151/258/359/378, 100/209/258/359, 100/378, 146/151/359/378, 209, 209/258, 209/298/359/378, 209/333/359, 258/378, 341, and 378, wherein the amino acid positions of said polypeptide sequence are numbered with reference to SEQ ID NO: 262. In some embodiments, the present invention provides an engineered ERED having a polypeptide sequence having at least 85%, 86%, 87%, 88%, 89%, 90%, 91%, 92%, 93%, 94%, 95%, 96%, 97%, 98%, 99%, or more sequence identity to SEQ ID NO: 262, and wherein the polypeptide sequence of said engineered ERED comprises at least one substitution or substitution set at one or more positions in said polypeptide sequence selected from 4T/100E/209R/258K/359T/378Q, 4T/151R/307G/378P, 4T/151R/333A, 4T/151R/359E/378Q, 4T/209R/359E/378P, 4T/209R/359T, 7G/95I/100K, 95I/100K/326G/333T/378T, 95I/100K/326G/378T, 95I/258R/378G, 95I/333T, 100E/146P/151R/258K/359E/378Q, 100E/209R/258K/359T, 100K/378G, 146P/151R/359T/378P, 209R, 209R/258K, 209R/298K/359E/378P, 209R/333A/359T, 258R/378G, 341G, 378E, and 378P, wherein the amino acid positions of said polypeptide sequence are numbered with reference to SEQ ID NO: 262. In some embodiments, the present invention provides an engineered ERED having a polypeptide sequence having at least 85%, 86%, 87%, 88%, 89%, 90%, 91%, 92%, 93%, 94%, 95%, 96%, 97%, 98%, 99%, or more sequence identity to SEQ ID NO: 262, and wherein the polypeptide sequence of said engineered ERED comprises at least one substitution or substitution set at one or more positions in said polypeptide sequence selected from V4T/N100E/N209R/A258K/Y359T/M378Q, V4T/K151R/E307G/M378P, V4T/K151R/V333A, V4T/K151R/Y359E/M378Q, V4T/N209R/Y359E/M378P, V4T/N209R/Y359T, F7G/V95I/N100K, V95I/N100K/N326G/V333T/M378T, V95I/N100K/N326G/M378T, V95I/A258R/M378G, V95I/V333T, N100E/A146P/K151R/A258K/Y359E/M378Q, N100E/N209R/A258K/Y359T, N100K/M378G, A146P/K151R/Y359T/M378P, N209R, N209R/A258K, N209R/L298K/Y359E/M378P, N209R/V333A/Y359T, A258R/M378G, P341G, M378E, and M378P, wherein the amino acid positions of said polypeptide sequence are numbered with reference to SEQ ID NO: 262. In some embodiments, the engineered ERED comprises a polypeptide sequence having at least 85%, 86%, 87%, 88%, 89%, 90%, 91%, 92%, 93%, 94%, 95%, 96%, 97%, 98%, 99%, or more sequence identity to SEQ ID NO: 262.

[0015] In some embodiments, the present invention provides an engineered ERED having a polypeptide sequence having at least 85%, 86%, 87%, 88%, 89%, 90%, 91%, 92%, 93%, 94%, 95%, 96%, 97%, 98%, 99%, or more sequence identity to SEQ ID NO: 282, and wherein the polypeptide sequence of said engineered ERED comprises at least one substitution or substitution set at one or more positions in said polypeptide sequence selected from 89, 243, and 283, wherein the amino acid positions of said polypeptide sequence are numbered with reference to SEQ ID NO: 282. In some embodiments, the present invention provides an engineered ERED having a polypeptide sequence having at least 85%, 86%, 87%, 88%, 89%, 90%, 91%, 92%, 93%, 94%, 95%, 96%, 97%, 98%, 99%, or more sequence identity to SEQ ID NO: 282, and wherein the polypeptide sequence of said engineered ERED comprises at least one substitution or substitution set at one or more positions in said polypeptide sequence selected from 89I, 243I, and 283C, wherein the amino acid positions of said polypeptide sequence are numbered with reference to SEQ ID NO: 282. In some embodiments, the present invention provides an engineered ERED having a polypeptide sequence having at least 85%, 86%, 87%, 88%, 89%, 90%, 91%, 92%, 93%, 94%, 95%, 96%, 97%, 98%, 99%, or more sequence identity to SEQ ID NO: 282, and wherein the polypeptide sequence of said engineered ERED comprises at least one substitution or substitution set at one or more positions in said polypeptide sequence selected from V89I, L243I, and L283C, wherein the amino acid positions of said polypeptide sequence are numbered with reference to SEQ ID NO: 282. In some embodiments, the engineered ERED comprises a polypeptide sequence having at least 85%, 86%, 87%, 88%, 89%, 90%, 91%, 92%, 93%, 94%, 95%, 96%, 97%, 98%, 99%, or more sequence identity to SEQ ID NO: 282.

[0016] In some embodiments, the present invention provides an engineered ERED having a polypeptide sequence having at least 85%, 86%, 87%, 88%, 89%, 90%, 91%, 92%, 93%, 94%, 95%, 96%, 97%, 98%, 99%, or more sequence identity to SEQ ID NO: 294, and wherein the polypeptide sequence of said engineered ERED comprises at least one substitution or substitution set at one or more positions in said polypeptide sequence selected from 47, 118, 148, 258/261, 314, 374/378, 377/378, and 378, wherein the amino acid positions of said polypeptide sequence are numbered with reference to SEQ ID NO: 294. In some embodiments, the present invention provides an engineered ERED having a polypeptide sequence having at least 85%, 86%, 87%, 88%, 89%, 90%, 91%, 92%, 93%, 94%, 95%, 96%, 97%, 98%, 99%, or more sequence identity to SEQ ID NO: 294, and wherein the polypeptide sequence of said engineered ERED comprises at least one substitution or substitution set at one or more positions in said polypeptide sequence selected from 47H, 118A, 118C, 148K, 148L, 258K/261L, 258K/261M, 258K/261V, 314L, 374S/378Q, 377K/378Q, and 378Q, wherein the amino acid positions of said polypeptide sequence are numbered with reference to SEQ ID NO: 294. In some embodiments, the present invention provides an engineered ERED having a polypeptide sequence having at least 85%, 86%, 87%, 88%, 89%, 90%, 91%, 92%, 93%, 94%, 95%, 96%, 97%, 98%, 99%, or more sequence identity to SEQ ID NO: 294, and wherein the polypeptide sequence of said engineered ERED comprises at least one substitution or substitution set at one or more positions in said polypeptide sequence selected from N47H, V118A, V118C, Q148K, Q148L, A258K/C261L, A258K/C261M, A258K/C261V, Y314L, T374S/G378Q, T377K/G378Q, and G378Q, wherein the amino acid positions of said polypeptide sequence are numbered with reference to SEQ ID NO: 294. In some embodiments, the engineered ERED comprises a polypeptide sequence having at least 85%, 86%, 87%, 88%, 89%, 90%, 91%, 92%, 93%, 94%, 95%, 96%, 97%, 98%, 99%, or more sequence identity to SEQ ID NO: 294.

[0017] In some embodiments, the present invention provides an engineered ERED having a polypeptide sequence having at least 85%, 86%, 87%, 88%, 89%, 90%, 91%, 92%, 93%, 94%, 95%, 96%, 97%, 98%, 99%, or more sequence identity to SEQ ID NO: 322, and wherein the polypeptide sequence of said engineered ERED comprises at least one substitution or substitution set at one or more positions in said polypeptide sequence selected from 47/89/95/148/258/261, 47/89/95/243/258/261/378, 47/89/258, 47/95, 89/95/243, 95/148, 95/148/243/258/261, 95/148/243/261, 95/148/258/261, 95/243, 100/243, 100/243/374, and 148/243, wherein the amino acid positions of said polypeptide sequence are numbered with reference to SEQ ID NO: 322. In some embodiments, the present invention provides an engineered ERED having a polypeptide sequence having at least 85%, 86%, 87%, 88%, 89%, 90%, 91%, 92%, 93%, 94%, 95%, 96%, 97%, 98%, 99%, or more sequence identity to SEQ ID NO: 322, and wherein the polypeptide sequence of said engineered ERED comprises at least one substitution or substitution set at one or more positions in said polypeptide sequence selected from 47H/89I/95I/148L/258K/261V, 47H/89I/95I/243I/258K/261L/378P, 47H/89I/258K, 47H/95I, 89I/95I/243I, 95I/148L, 95I/148L/243I/258K/261V, 95I/148L/243I/261V, 95I/148L/258K/261V, 95I/243I, 100N/243I, 100N/243I/374T, and 148L/243I, wherein the amino acid positions of said polypeptide sequence are numbered with reference to SEQ ID NO: 322. In some embodiments, the present invention provides an engineered ERED having a polypeptide sequence having at least 85%, 86%, 87%, 88%, 89%, 90%, 91%, 92%, 93%, 94%, 95%, 96%, 97%, 98%, 99%, or more sequence identity to SEQ ID NO: 322, and wherein the polypeptide sequence of said engineered ERED comprises at least one substitution or substitution set at one or more positions in said polypeptide sequence selected from N47H/V89I/V95I/Q148L/A258K/C261V, N47H/V89I/V95I/L243I/A258K/C261L/Q378P, N47H/V89I/A258K, N47H/V95I, V89I/V95I/L243I, V95I/Q148L, V95I/Q148L/L243I/A258K/C261V, V95I/Q148L/L243I/C261V, V95I/Q148L/A258K/C261V, V95I/L243I, K100N/L243I, K100N/L243I/S374T, and Q148L/L243I, wherein the amino acid positions of said polypeptide sequence are numbered with reference to SEQ ID NO: 322. In some embodiments, the engineered ERED comprises a polypeptide sequence having at least 85%, 86%, 87%, 88%, 89%, 90%, 91%, 92%, 93%, 94%, 95%, 96%, 97%, 98%, 99%, or more sequence identity to SEQ ID NO: 322.

[0018] In some embodiments, the present invention provides an engineered ERED having a polypeptide sequence having at least 85%, 86%, 87%, 88%, 89%, 90%, 91%, 92%, 93%, 94%, 95%, 96%, 97%, 98%, 99%, or more sequence identity to SEQ ID NO: 346, and wherein the polypeptide sequence of said engineered ERED comprises at least one substitution or substitution set at one or more positions in said polypeptide sequence selected from 10, 11, 13, 20, 21, 29, 64, 99, 99/398, 108, 175, 235, 243, 320, 333, 388, 392, 393, and 397, wherein the amino acid positions of said polypeptide sequence are numbered with reference to SEQ ID NO: 346. In some embodiments, the present invention provides an engineered ERED having a polypeptide sequence having at least 85%, 86%, 87%, 88%, 89%, 90%, 91%, 92%, 93%, 94%, 95%, 96%, 97%, 98%, 99%, or more sequence identity to SEQ ID NO: 346, and wherein the polypeptide sequence of said engineered ERED comprises at least one substitution or substitution set at one or more positions in said polypeptide sequence selected from 10R, 11G, 11V, 13Q, 13V, 20E, 21L, 29V, 64A, 64E, 64N, 64V, 99M, 99V, 99V/398K, 108L, 108S, 175R, 235G, 243M, 320R, 333Q, 388G, 388V, 392G, 393A, 393E, 393T, 397A, 397C, 397D, and 397F, wherein the amino acid positions of said polypeptide sequence are numbered with reference to SEQ ID NO: 346. In some embodiments, the present invention provides an engineered ERED having a polypeptide sequence having at least 85%, 86%, 87%, 88%, 89%, 90%, 91%, 92%, 93%, 94%, 95%, 96%, 97%, 98%, 99%, or more sequence identity to SEQ ID NO: 346, and wherein the polypeptide sequence of said engineered ERED comprises at least one substitution or substitution set at one or more positions in said polypeptide sequence selected from Q10R, A11G, A11V, R13Q, R13V, P20E, I21L, A29V, R64A, R64E, R64N, R64V, K99M, K99V, K99V/N398K, C108L, C108S, V175R, A235G, L243M, P320R, V333Q, T388G, T388V, A392G, V393A, V393E, V393T, W397A, W397C, W397D, and W397F, wherein the amino acid positions of said polypeptide sequence are numbered with reference to SEQ ID NO: 346. In some embodiments, the engineered ERED comprises a polypeptide sequence having at least 85%, 86%, 87%, 88%, 89%, 90%, 91%, 92%, 93%, 94%, 95%, 96%, 97%, 98%, 99%, or more sequence identity to SEQ ID NO: 346.

[0019] In some embodiments, the present invention provides an engineered KRED having a polypeptide sequence having at least 85%, 86%, 87%, 88%, 89%, 90%, 91%, 92%, 93%, 94%, 95%, 96%, 97%, 98%, 99%, or more sequence identity to SEQ ID NO: 432, and wherein the polypeptide sequence of said engineered KRED comprises at least one substitution or substitution set at one or more positions in said polypeptide sequence selected from 2/72, 2/72/172, 21, 21/65/72/73/103, 21/65/72/131/147/181, 21/65/72/147, 21/65/103/152, 21/65/131/152, 21/65/147/152, 21/65/152, 21/72/73/103, 21/72/103, 21/72/103/131/152/226, 21/72/103/147, 21/72/103/147/152/181, 21/72/131/181/197, 21/72/152/181, 21/73/103, 21/73/131/147, 21/73/147, 21/73/181, 21/103, 21/103/147, 21/103/147/152, 21/147, and 26/173/221, wherein the amino acid positions of said polypeptide sequence are numbered with reference to SEQ ID NO: 432. In some embodiments, the present invention provides an engineered KRED having a polypeptide sequence having at least 85%, 86%, 87%, 88%, 89%, 90%, 91%, 92%, 93%, 94%, 95%, 96%, 97%, 98%, 99%, or more sequence identity to SEQ ID NO: 432, and wherein the polypeptide sequence of said engineered KRED comprises at least one substitution or substitution set at one or more positions in said polypeptide sequence selected from 2S/72D, 2S/72D/172V, 21K, 21K/65R/72T/73V/103D, 21K/65R/72T/131Y/147I/181I, 21K/65R/72T/147I, 21K/65R/103D/152K, 21K/65R/131Y/152K, 21K/65R/147I/152K, 21K/65R/152K, 21K/72T/73V/103D, 21K/72T/103D, 21K/72T/103D/131Y/152K/226L, 21K/72T/103D/147I, 21K/72T/103D/147I/152K/181I, 21K/72T/131Y/181I/197R, 21K/72T/152K/181I, 21K/73V/103D, 21K/73V/131Y/147I, 21K/73V/147I, 21K/73V/181I, 21K/103D, 21K/103D/147I, 21K/103D/147I/152K, 21K/147I, and 26R/173Y/221D, wherein the amino acid positions of said polypeptide sequence are numbered with reference to SEQ ID NO: 432. In some embodiments, the present invention provides an engineered KRED having a polypeptide sequence having at least 85%, 86%, 87%, 88%, 89%, 90%, 91%, 92%, 93%, 94%, 95%, 96%, 97%, 98%, 99%, or more sequence identity to SEQ ID NO: 432, and wherein the polypeptide sequence of said engineered KRED comprises at least one substitution or substitution set at one or more positions in said polypeptide sequence selected from T2S/K72D, T2S/K72D/L172V, L21K, L21K/S65R/K72T/L73V/T103D, L21K/S65R/K72T/N131Y/L147I/V181I, L21K/S65R/K72T/L147I, L21K/S65R/T103D/T152K, L21K/S65R/N131Y/T152K, L21K/S65R/L147I/T152K, L21K/S65R/T152K, L21K/K72T/L73V/T103D, L21K/K72T/T103D, L21K/K72T/T103D/N131Y/T152K/I226L, L21K/K72T/T103D/L147I, L21K/K72T/T103D/L147I/T152K/V181I, L21K/K72T/N131Y/V181I/D197R, L21K/K72T/T152K/V181I, L21K/L73V/T103D, L21K/L73V/N131Y/L147I, L21K/L73V/L147I, L21K/L73V/V181I, L21K/T103D, L21K/T103D/L147I, L21K/T103D/L147I/T152K, L21K/L147I, and K26R/D173Y/N221D, wherein the amino acid positions of said polypeptide sequence are numbered with reference to SEQ ID NO: 432. In some embodiments, the engineered KRED comprises a polypeptide sequence having at least 85%, 86%, 87%, 88%, 89%, 90%, 91%, 92%, 93%, 94%, 95%, 96%, 97%, 98%, 99%, or more sequence identity to SEQ ID NO: 432.

[0020] In some embodiments, the present invention provides an engineered KRED having a polypeptide sequence having at least 85%, 86%, 87%, 88%, 89%, 90%, 91%, 92%, 93%, 94%, 95%, 96%, 97%, 98%, 99%, or more sequence identity to SEQ ID NO: 476, and wherein the polypeptide sequence of said engineered KRED comprises at least one substitution or substitution set at one or more positions in said polypeptide sequence selected from 17, 43, 45, 54, 71, 96, 190, 194, 195, 198, 205, and 250, wherein the amino acid positions of said polypeptide sequence are numbered with reference to SEQ ID NO: 476. In some embodiments, the present invention provides an engineered KRED having a polypeptide sequence having at least 85%, 86%, 87%, 88%, 89%, 90%, 91%, 92%, 93%, 94%, 95%, 96%, 97%, 98%, 99%, or more sequence identity to SEQ ID NO: 476, and wherein the polypeptide sequence of said engineered KRED comprises at least one substitution or substitution set at one or more positions in said polypeptide sequence selected from 17K, 17M, 17R, 43R, 45H, 54P, 71E, 71G, 96R, 190A, 190L, 190Q, 190R, 190V, 194R, 195M, 198A, 198R, 205E, and 250L, wherein the amino acid positions of said polypeptide sequence are numbered with reference to SEQ ID NO: 476. In some embodiments, the present invention provides an engineered KRED having a polypeptide sequence having at least 85%, 86%, 87%, 88%, 89%, 90%, 91%, 92%, 93%, 94%, 95%, 96%, 97%, 98%, 99%, or more sequence identity to SEQ ID NO: 476, and wherein the polypeptide sequence of said engineered KRED comprises at least one substitution or substitution set at one or more positions in said polypeptide sequence selected from L17K, L17M, L17R, V43R, E45H, T54P, T71E, T71G, S96R, E190A, E190L, E190Q, E190R, E190V, P194R, L195M, D198A, D198R, M205E, and T250L, wherein the amino acid positions of said polypeptide sequence are numbered with reference to SEQ ID NO: 476. In some embodiments, the engineered KRED comprises a polypeptide sequence having at least 85%, 86%, 87%, 88%, 89%, 90%, 91%, 92%, 93%, 94%, 95%, 96%, 97%, 98%, 99%, or more sequence identity to SEQ ID NO: 476.

[0021] In some additional embodiments, the present invention provides engineered EREDs, wherein the engineered EREDs comprise polypeptide sequences that are at least 85%, 86%, 87%, 88%, 89%, 90%, 91%, 92%, 93%, 94%, 95%, 96%, 97%, 98%, 99% or more identical to the sequence of at least one engineered ERED variant set forth in Tables 2.2, 3.1, 4.1, 5.1, 6.1, 7.1, 8.1, and 9.1.

[0022] In some additional embodiments, the present invention provides engineered KREDs, wherein the engineered KREDs comprise polypeptide sequences that are at least 85%, 86%, 87%, 88%, 89%, 90%, 91%, 92%, 93%, 94%, 95%, 96%, 97%, 98%, 99% or more identical to the sequence of at least one engineered KRED variant set forth in Tables 10.1 and 11.1.

[0023] In some additional embodiments, the present invention provides engineered EREDs, wherein the engineered EREDs comprise polypeptide sequences that are at least 85%, 86%, 87%, 88%, 89%, 90%, 91%, 92%, 93%, 94%, 95%, 96%, 97%, 98%, 99% or more identical to SEQ ID NOs: 10, 20, 162, 262, 282, 322, and/or 346. In some embodiments, the engineered ERED comprises a variant engineered ERED set forth in SEQ ID NOs: 10, 20, 162, 262, 282, 322, and/or 346.

[0024] In some additional embodiments, the present invention provides engineered KREDs, wherein the engineered KREDs comprise polypeptide sequences that are at least 85%, 86%, 87%, 88%, 89%, 90%, 91%, 92%, 93%, 94%, 95%, 96%, 97%, 98%, 99% or more identical to SEQ ID NOs: 432 and/or 476. In some embodiments, the engineered KRED comprises a variant engineered KRED set forth in SEQ ID NOs: 432 and/or 476.

[0025] The present invention also provides engineered EREDs wherein the engineered EREDs comprise polypeptide sequences that are at least 85%, 86%, 87%, 88%, 89%, 90%, 91%, 92%, 93%, 94%, 95%, 96%, 97%, 98%, 99% or more identical to the sequence of at least one engineered ERED variant set forth in the even numbered sequences of SEQ ID NOs: 10-430.

[0026] The present invention also provides engineered KREDs wherein the engineered KREDs comprise polypeptide sequences that are at least 85%, 86%, 87%, 88%, 89%, 90%, 91%, 92%, 93%, 94%, 95%, 96%, 97%, 98%, 99% or more identical to the sequence of at least one engineered KRED variant set forth in the even numbered sequences of SEQ ID NOs: 434-524.

[0027] The present invention further provides engineered EREDs, wherein said engineered EREDs comprise at least one improved property compared to wild-type Saccharomyces cerevisiae ERED or another engineered enzyme or reference enzyme. In some additional embodiments, the improved property comprises improved production of compound (2). In yet some additional embodiments, the engineered ERED is purified. The present invention also provides compositions comprising at least one engineered ERED provided herein.

[0028] The present invention further provides engineered KREDs, wherein said engineered KREDs comprise at least one improved property compared to wild-type Lactobacillus kefir KRED or another engineered enzyme or reference enzyme. In some additional embodiments, the improved property comprises improved production of compound (3). In yet some additional embodiments, the engineered KRED is purified. The present invention also provides compositions comprising at least one engineered KRED provided herein.

[0029] The present invention also provides polynucleotide sequences encoding at least one engineered ERED provided herein. In some embodiments, the polynucleotide sequence encoding at least one engineered ERED comprises a polynucleotide sequence having at least 85%, 86%, 87%, 88%, 89%, 90%, 91%, 92%, 93%, 94%, 95%, 96%, 97%, 98%, 99%, or more sequence identity to SEQ ID NOs: 9, 19, 161, 261, 281, 321 and/or 345. In some embodiments, the polynucleotide sequence encoding at least one engineered ERED, comprises a polynucleotide sequence having at least 85%, 86%, 87%, 88%, 89%, 90%, 91%, 92%, 93%, 94%, 95%, 96%, 97%, 98%, 99%, or more sequence identity to SEQ ID NOs: 9, 19, 161, 261, 281, 321 and/or 345, wherein the polynucleotide sequence of said engineered ERED comprises at least one substitution at one or more positions. In some further embodiments, the polynucleotide sequence encoding at least one engineered ERED comprises at least 85%, 86%, 87%, 88%, 89%, 90%, 91%, 92%, 93%, 94%, 95%, 96%, 97%, 98%, 99%, or more sequence identity to SEQ ID NOs: 9, 19, 161, 261, 281, 321 and/or 345, or a functional fragment thereof. In yet some additional embodiments, the polynucleotide sequence is operably linked to a control sequence. In some further embodiments, the polynucleotide sequence is codon optimized. In some additional embodiments, the polynucleotide sequence encoding at least one engineered ERED comprises at least 85%, 86%, 87%, 88%, 89%, 90%, 91%, 92%, 93%, 94%, 95%, 96%, 97%, 98%, 99%, or more sequence identity to a polynucleotide sequence forth set in the odd numbered sequences of SEQ ID NOs: 9-429. In still some additional embodiments, the polynucleotide sequence comprises a polynucleotide sequence set forth in the odd numbered sequences of SEQ ID NOS: 9-429.

[0030] The present invention also provides polynucleotide sequences encoding at least one engineered KRED provided herein. In some embodiments, the polynucleotide sequence encoding at least one engineered KRED comprises a polynucleotide sequence having at least 85%, 86%, 87%, 88%, 89%, 90%, 91%, 92%, 93%, 94%, 95%, 96%, 97%, 98%, 99%, or more sequence identity to SEQ ID NOs: 431 and/or 475. In some embodiments, the polynucleotide sequence encoding at least one engineered KRED, comprises a polynucleotide sequence having at least 85%, 86%, 87%, 88%, 89%, 90%, 91%, 92%, 93%, 94%, 95%, 96%, 97%, 98%, 99%, or more sequence identity to SEQ ID NOs: 431 and/or 475, wherein the polynucleotide sequence of said engineered KRED comprises at least one substitution at one or more positions. In some further embodiments, the polynucleotide sequence encoding at least one engineered KRED comprises at least 85%, 86%, 87%, 88%, 89%, 90%, 91%, 92%, 93%, 94%, 95%, 96%, 97%, 98%, 99%, or more sequence identity to SEQ ID NOs: 431 and/or 475, or a functional fragment thereof. In yet some additional embodiments, the polynucleotide sequence is operably linked to a control sequence. In some further embodiments, the polynucleotide sequence is codon optimized. In some additional embodiments, the polynucleotide sequence encoding at least one engineered KRED comprises at least 85%, 86%, 87%, 88%, 89%, 90%, 91%, 92%, 93%, 94%, 95%, 96%, 97%, 98%, 99%, or more sequence identity to a polynucleotide sequence set forth in the odd numbered sequences of SEQ ID NOs: 431-523. In still some additional embodiments, the polynucleotide sequence comprises a polynucleotide sequence set forth in the odd numbered sequences of SEQ ID NOs: 431-523.

[0031] The present invention also provides expression vectors comprising at least one polynucleotide sequence provided herein. The present invention further provides host cells comprising at least one expression vector provided herein. In some embodiments, the present invention provides host cells comprising at least one polynucleotide sequence provided herein.

[0032] The present invention also provides methods of producing an engineered ERED and/or an engineered KRED in a host cell, comprising culturing the host cell provided herein, under suitable conditions, such that at least one engineered ERED and/or KRED is produced. In some embodiments, the methods further comprise recovering at least one engineered ERED and/or KRED from the culture and/or host cell. In some additional embodiments, the methods further comprise the step of purifying said at least one ERED and/or KRED.

### DESCRIPTION OF THE INVENTION

[0033] The present disclosure provides engineered enone reductase enzymes (EREDs), polypeptides having ERED activity, and polynucleotides encoding these enzymes, as well as vectors and host cells comprising these polynucleotides and polypeptides. Methods for producing ERED enzymes are also provided. The present disclosure also provides engineered ketoreductase enzymes (KREDs), polypeptides having KRED activity, and polynucleotides encoding these enzymes, as well as vectors and host cells comprising these polynucleotides and polypeptides. Methods for producing KRED enzymes are also provided. The present disclosure further provides compositions comprising the ERED and KRED enzymes and methods of using the engineered ERED and KRED enzymes. The present disclosure finds particular use in the production of pharmaceutical compounds.

[0034] Unless defined otherwise, all technical and scientific terms used herein generally have the same meaning as commonly understood by one of ordinary skill in the art to which this invention pertains. Generally, the nomenclature used herein and the laboratory procedures of cell culture, molecular genetics, microbiology, organic chemistry, analytical chemistry and nucleic acid chemistry described below are those well-known and commonly employed in the art. Such techniques are well-known and described in numerous texts and reference works well known to those of skill in the art. Standard techniques, or modifications thereof, are used for chemical syntheses and chemical analyses. All patents, patent applications, articles and publications mentioned herein, both supra and infra, are hereby expressly incorporated herein by reference.

[0035] Although any suitable methods and materials similar or equivalent to those described herein find use in the practice of the present invention, some methods and materials are described herein. It is to be understood that this invention is not limited to the particular methodology, protocols, and reagents described, as these may vary, depending upon the context they are used by those of skill in the art. Accordingly, the terms defined immediately below are more fully described by reference to the invention as a whole.

[0036] It is to be understood that both the foregoing general description and the following detailed description are exemplary and explanatory only and are not restrictive of the present invention. The section headings used herein are for organizational purposes only and not to be construed as limiting the subject matter described. Numeric ranges are inclusive of the numbers defining the range. Thus, every numerical range disclosed herein is intended to encompass every narrower numerical range that falls within such broader numerical range, as if such narrower numerical ranges were all expressly written herein. It is also intended that every maximum (or minimum) numerical limitation disclosed herein includes every lower (or higher) numerical limitation, as if such lower (or higher) numerical limitations were expressly written herein.

### Abbreviations and Definitions

[0037] The abbreviations used for the genetically encoded amino acids are conventional and are as follows: alanine (Ala or A), arginine (Arg or R), asparagine (Asn or N), aspartate (Asp or D), cysteine (Cys or C), glutamate (Glu or E), glutamine (Gln or Q), histidine (His or H), isoleucine (Ile or I), leucine (Leu or L), lysine (Lys or K), methionine (Met or M), phenylalanine (Phe or F), proline (Pro or P), serine (Ser or S), threonine (Thr or T), tryptophan (Trp or W), tyrosine (Tyr or Y), and valine (Val or V).

[0038] When the three-letter abbreviations are used, unless specifically preceded by an “L” or a “D” or clear from the context in which the abbreviation is used, the amino acid may be in either the L- or D-configuration about α-carbon (Cα). For example, whereas “Ala” designates alanine without specifying the configuration about the α-carbon, “D-Ala” and “L-Ala” designate D-alanine and L-alanine, respectively. When the one-letter abbreviations are used, upper case letters designate amino acids in the L-configuration about the α-carbon and lower case letters designate amino acids in the D-configuration about the α-carbon. For example, “A” designates L-alanine and “a” designates D-alanine. When polypeptide sequences are presented as a string of one-letter or three-letter abbreviations (or mixtures thereof), the sequences are presented in the amino (N) to carboxy (C) direction in accordance with common convention.

[0039] The abbreviations used for the genetically encoding nucleosides are conventional and are as follows: adenosine (A); guanosine (G); cytidine (C); thymidine (T); and uridine (U). Unless specifically delineated, the abbreviated nucleosides may be either ribonucleosides or 2′-deoxyribonucleosides. The nucleosides may be specified as being either ribonucleosides or 2′-deoxyribonucleosides on an individual basis or on an aggregate basis. When nucleic acid sequences are presented as a string of one-letter abbreviations, the sequences are presented in the 5′ to 3′ direction in accordance with common convention, and the phosphates are not indicated.

[0040] In reference to the present invention, the technical and scientific terms used in the descriptions herein will have the meanings commonly understood by one of ordinary skill in the art, unless specifically defined otherwise. Accordingly, the following terms are intended to have the following meanings.

[0041] As used herein, the singular forms “a”, “an” and “the” include plural referents unless the context clearly indicates otherwise. Thus, for example, reference to “a polypeptide” includes more than one polypeptide.

[0042] Similarly, “comprise,” “comprises,” “comprising” “include,” “includes,” and “including” are interchangeable and not intended to be limiting. Thus, as used herein, the term “comprising” and its cognates are used in their inclusive sense (i.e., equivalent to the term “including” and its corresponding cognates).

[0043] It is to be further understood that where descriptions of various embodiments use the term “comprising,” those skilled in the art would understand that in some specific instances, an embodiment can be alternatively described using language “consisting essentially of” or “consisting of.”

[0044] As used herein, the term “about” means an acceptable error for a particular value. In some instances, “about” means within 0.05%, 0.5%, 1.0%, or 2.0%, of a given value range. In some instances, “about” means within 1, 2, 3, or 4 standard deviations of a given value.

[0045] As used herein, “EC” number refers to the Enzyme Nomenclature of the Nomenclature Committee of the International Union of Biochemistry and Molecular Biology (NC-IUBMB). The IUBMB biochemical classification is a numerical classification system for enzymes based on the chemical reactions they catalyze.

[0046] As used herein, “ATCC” refers to the American Type Culture Collection whose biorepository collection includes genes and strains.

[0047] As used herein, “NCBI” refers to National Center for Biological Information and the sequence databases provided therein.

[0048] As used herein, “enone reductase,” “ene reductase,” and “ERED” are used interchangeably herein to refer to a polypeptide having a capability of reducing an α,β unsaturated compound to the corresponding saturated compound. More specifically, enone reductases are capable of reducing α, β unsaturated ketones, aldehydes, nitriles, olefins, and esters. Enone reductases typically utilize a cofactor reduced nicotinamide adenine dinucleotide (NADH) or reduced nicotinamide adenine dinucleotide phosphate (NADPH) as the reducing agent. Enone reductases as used herein include naturally occurring (wild-type) enone reductases as well as non-naturally occurring engineered polypeptides generated by human manipulation.

[0049] As used herein, “ketoreductase” and “KRED” are used herein to refer to a polypeptide of the class (EC1.1.1.184), useful for the synthesis of optically active alcohols from the corresponding prochiral ketone substrate and by stereoselective reduction of corresponding racemic aldehyde substrates. KREDs typically convert ketone and aldehyde substrates to the corresponding alcohol product, but may also catalyze the reverse reaction, oxidation of an alcohol substrate to the corresponding ketone/aldehyde product. Ketoreductases typically utilize a cofactor reduced nicotinamide adenine dinucleotide (NADH) or reduced nicotinamide adenine dinucleotide phosphate (NADPH) as the reducing agent. Ketoreductases, as used herein, include naturally occurring (wild-type) ketoreductases as well as non-naturally occurring engineered polypeptides generated by human manipulation.

[0050] “Protein,” “polypeptide,” and “peptide” are used interchangeably herein to denote a polymer of at least two amino acids covalently linked by an amide bond, regardless of length or post-translational modification (e.g., glycosylation or phosphorylation). Included within this definition are D- and L-amino acids, and mixtures of D- and L-amino acids, as well as polymers comprising D- and L-amino acids, and mixtures of D- and L-amino acids.

[0051] “Amino acids” are referred to herein by either their commonly known three-letter symbols or by the one-letter symbols recommended by IUPAC-IUB Biochemical Nomenclature Commission. Nucleotides, likewise, may be referred to by their commonly accepted single letter codes.

[0052] As used herein, “hydrophilic amino acid or residue” refers to an amino acid or residue having a side chain exhibiting a hydrophobicity of less than zero according to the normalized consensus hydrophobicity scale of Eisenberg et al., (Eisenberg et al., J. Mol. Biol., 179:125-142 [1984]). Genetically encoded hydrophilic amino acids include L-Thr (T), L-Ser (S), L-His (H), L-Glu (E), L-Asn (N), L-Gln (Q), L-Asp (D), L-Lys (K) and L-Arg (R).

[0053] As used herein, “acidic amino acid or residue” refers to a hydrophilic amino acid or residue having a side chain exhibiting a pKa value of less than about 6 when the amino acid is included in a peptide or polypeptide. Acidic amino acids typically have negatively charged side chains at physiological pH due to loss of a hydrogen ion. Genetically encoded acidic amino acids include L-Glu (E) and L-Asp (D).

[0054] As used herein, “basic amino acid or residue” refers to a hydrophilic amino acid or residue having a side chain exhibiting a pKa value of greater than about 6 when the amino acid is included in a peptide or polypeptide. Basic amino acids typically have positively charged side chains at physiological pH due to association with hydronium ion. Genetically encoded basic amino acids include L-Arg (R) and L-Lys (K).

[0055] As used herein, “polar amino acid or residue” refers to a hydrophilic amino acid or residue having a side chain that is uncharged at physiological pH, but which has at least one bond in which the pair of electrons shared in common by two atoms is held more closely by one of the atoms. Genetically encoded polar amino acids include L-Asn (N), L-Gln (Q), L-Ser (S) and L-Thr (T).

[0056] As used herein, “hydrophobic amino acid or residue” refers to an amino acid or residue having a side chain exhibiting a hydrophobicity of greater than zero according to the normalized consensus hydrophobicity scale of Eisenberg et al., (Eisenberg et al., J. Mol. Biol., 179:125-142 [1984]). Genetically encoded hydrophobic amino acids include L-Pro (P), L-Ile (I), L-Phe (F), L-Val (V), L-Leu (L), L-Trp (W), L-Met (M), L-Ala (A) and L-Tyr (Y).

[0057] As used herein, “aromatic amino acid or residue” refers to a hydrophilic or hydrophobic amino acid or residue having a side chain that includes at least one aromatic or heteroaromatic ring. Genetically encoded aromatic amino acids include L-Phe (F), L-Tyr (Y) and L-Trp (W). Although owing to the pKa of its heteroaromatic nitrogen atom L-His (H) it is sometimes classified as a basic residue, or as an aromatic residue as its side chain includes a heteroaromatic ring, herein histidine is classified as a hydrophilic residue or as a “constrained residue” (see below).

[0058] As used herein, “constrained amino acid or residue” refers to an amino acid or residue that has a constrained geometry. Herein, constrained residues include L-Pro (P) and L-His (H). Histidine has a constrained geometry because it has a relatively small imidazole ring. Proline has a constrained geometry because it also has a five membered ring.

[0059] As used herein, “non-polar amino acid or residue” refers to a hydrophobic amino acid or residue having a side chain that is uncharged at physiological pH and which has bonds in which the pair of electrons shared in common by two atoms is generally held equally by each of the two atoms (i.e., the side chain is not polar). Genetically encoded non-polar amino acids include L-Gly (G), L-Leu (L), L-Val (V), L-Ile (I), L-Met (M) and L-Ala (A).

[0060] As used herein, “aliphatic amino acid or residue” refers to a hydrophobic amino acid or residue having an aliphatic hydrocarbon side chain. Genetically encoded aliphatic amino acids include L-Ala (A), L-Val (V), L-Leu (L) and L-Ile (I). It is noted that cysteine (or “L-Cys” or “[C]”) is unusual in that it can form disulfide bridges with other L-Cys (C) amino acids or other sulfanyl- or sulfhydryl-containing amino acids. The “cysteine-like residues” include cysteine and other amino acids that contain sulfhydryl moieties that are available for formation of disulfide bridges. The ability of L-Cys (C) (and other amino acids with —SH containing side chains) to exist in a peptide in either the reduced free —SH or oxidized disulfide-bridged form affects whether L-Cys (C) contributes net hydrophobic or hydrophilic character to a peptide. While L-Cys (C) exhibits a hydrophobicity of 0.29 according to the normalized consensus scale of Eisenberg (Eisenberg et al., 1984, supra), it is to be understood that for purposes of the present disclosure, L-Cys (C) is categorized into its own unique group.

[0061] As used herein, “small amino acid or residue” refers to an amino acid or residue having a side chain that is composed of a total three or fewer carbon and/or heteroatoms (excluding the α-carbon and hydrogens). The small amino acids or residues may be further categorized as aliphatic, non-polar, polar or acidic small amino acids or residues, in accordance with the above definitions. Genetically-encoded small amino acids include L-Ala (A), L-Val (V), L-Cys (C), L-Asn (N), L-Ser (S), L-Thr (T) and L-Asp (D).

[0062] As used herein, “hydroxyl-containing amino acid or residue” refers to an amino acid containing a hydroxyl (—OH) moiety. Genetically-encoded hydroxyl-containing amino acids include L-Ser (S) L-Thr (T) and L-Tyr (Y).

[0063] As used herein, “polynucleotide” and “nucleic acid” refer to two or more nucleotides that are covalently linked together. The polynucleotide may be wholly comprised of ribonucleotides (i.e., RNA), wholly comprised of 2′ deoxyribonucleotides (i.e., DNA), or comprised of mixtures of ribo- and 2′ deoxyribonucleotides. While the nucleosides will typically be linked together via standard phosphodiester linkages, the polynucleotides may include one or more non-standard linkages. The polynucleotide may be single-stranded or double-stranded, or may include both single-stranded regions and double-stranded regions. Moreover, while a polynucleotide will typically be composed of the naturally occurring encoding nucleobases (i.e., adenine, guanine, uracil, thymine and cytosine), it may include one or more modified and/or synthetic nucleobases, such as, for example, inosine, xanthine, hypoxanthine, etc. In some embodiments, such modified or synthetic nucleobases are nucleobases encoding amino acid sequences.

[0064] As used herein, “nucleoside” refers to glycosylamines comprising a nucleobase (i.e., a nitrogenous base), and a 5-carbon sugar (e.g., ribose or deoxyribose). Non-limiting examples of nucleosides include cytidine, uridine, adenosine, guanosine, thymidine, and inosine. In contrast, the term “nucleotide” refers to the glycosylamines comprising a nucleobase, a 5-carbon sugar, and one or more phosphate groups. In some embodiments, nucleosides can be phosphorylated by kinases to produce nucleotides.

[0065] As used herein, “nucleoside diphosphate” refers to glycosylamines comprising a nucleobase (i.e., a nitrogenous base), a 5-carbon sugar (e.g., ribose or deoxyribose), and a diphosphate (i.e., pyrophosphate) moiety. In some embodiments herein, “nucleoside diphosphate” is abbreviated as “NDP”. Non-limiting examples of nucleoside diphosphates include cytidine diphosphate (CDP), uridine diphosphate (UDP), adenosine diphosphate (ADP), guanosine diphosphate (GDP), thymidine diphosphate (TDP), and inosine diphosphate (IDP). The terms “nucleoside” and “nucleotide” may be used interchangeably in some contexts.

[0066] As used herein, “coding sequence” refers to that portion of a nucleic acid (e.g., a gene) that encodes an amino acid sequence of a protein.

[0067] As used herein, the terms “biocatalysis,” “biocatalytic,” “biotransformation,” and “biosynthesis” refer to the use of enzymes to perform chemical reactions on organic compounds.

[0068] As used herein, “wild-type” and “naturally occurring” refer to the form found in nature. For example, a wild-type polypeptide or polynucleotide sequence is a sequence present in an organism that can be isolated from a source in nature and which has not been intentionally modified by human manipulation.

[0069] As used herein, “recombinant,” “engineered,” “variant,” and “non-naturally occurring” when used with reference to a cell, nucleic acid, or polypeptide, refers to a material, or a material corresponding to the natural or native form of the material, that has been modified in a manner that would not otherwise exist in nature. In some embodiments, the cell, nucleic acid or polypeptide is identical a naturally occurring cell, nucleic acid or polypeptide, but is produced or derived from synthetic materials and/or by manipulation using recombinant techniques. Non-limiting examples include, among others, recombinant cells expressing genes that are not found within the native (non-recombinant) form of the cell or express native genes that are otherwise expressed at a different level.

[0070] The term “percent (%) sequence identity” is used herein to refer to comparisons among polynucleotides or polypeptides, and are determined by comparing two optimally aligned sequences over a comparison window, wherein the portion of the polynucleotide or polypeptide sequence in the comparison window may comprise additions or deletions (i.e., gaps) as compared to the reference sequence for optimal alignment of the two sequences. The percentage may be calculated by determining the number of positions at which the identical nucleic acid base or amino acid residue occurs in both sequences to yield the number of matched positions, dividing the number of matched positions by the total number of positions in the window of comparison and multiplying the result by 100 to yield the percentage of sequence identity. Alternatively, the percentage may be calculated by determining the number of positions at which either the identical nucleic acid base or amino acid residue occurs in both sequences or a nucleic acid base or amino acid residue is aligned with a gap to yield the number of matched positions, dividing the number of matched positions by the total number of positions in the window of comparison and multiplying the result by 100 to yield the percentage of sequence identity. Those of skill in the art appreciate that there are many established algorithms available to align two sequences. Optimal alignment of sequences for comparison can be conducted by any suitable method, including, but not limited to the local homology algorithm of Smith and Waterman (Smith and Waterman, Adv. Appl. Math., 2:482 [1981]), by the homology alignment algorithm of Needleman and Wunsch (Needleman and Wunsch, J. Mol. Biol., 48:443 [1970]), by the search for similarity method of Pearson and Lipman (Pearson and Lipman, Proc. Natl. Acad. Sci. USA 85:2444 [1988]), by computerized implementations of these algorithms (e.g., GAP, BESTFIT, FASTA, and TFASTA in the GCG Wisconsin Software Package), or by visual inspection, as known in the art. Examples of algorithms that are suitable for determining percent sequence identity and sequence similarity include, but are not limited to the BLAST and BLAST 2.0 algorithms, which are described by Altschul et al. (See Altschul et al., J. Mol. Biol., 215: 403-410 [1990]; and Altschul et al., Nucl. Acids Res., 3389-3402 [1977], respectively). Software for performing BLAST analyses is publicly available through the National Center for Biotechnology Information website. This algorithm involves first identifying high scoring sequence pairs (HSPs) by identifying short words of length W in the query sequence, which either match or satisfy some positive-valued threshold score T when aligned with a word of the same length in a database sequence. T is referred to as, the neighborhood word score threshold (See, Altschul et al., supra). These initial neighborhood word hits act as seeds for initiating searches to find longer HSPs containing them. The word hits are then extended in both directions along each sequence for as far as the cumulative alignment score can be increased. Cumulative scores are calculated using, for nucleotide sequences, the parameters M (reward score for a pair of matching residues; always >0) and N (penalty score for mismatching residues; always <0). For amino acid sequences, a scoring matrix is used to calculate the cumulative score. Extension of the word hits in each direction are halted when: the cumulative alignment score falls off by the quantity X from its maximum achieved value; the cumulative score goes to zero or below, due to the accumulation of one or more negative-scoring residue alignments; or the end of either sequence is reached. The BLAST algorithm parameters W, T, and X determine the sensitivity and speed of the alignment. The BLASTN program (for nucleotide sequences) uses as defaults a wordlength (W) of 11, an expectation (E) of 10, M=5, N=−4, and a comparison of both strands. For amino acid sequences, the BLASTP program uses as defaults a word length (W) of 3, an expectation (E) of 10, and the BLOSUM62 scoring matrix (See, Henikoff and Henikoff, Proc. Natl. Acad. Sci. USA 89:10915 [1989]). Exemplary determination of sequence alignment and % sequence identity can employ the BESTFIT or GAP programs in the GCG Wisconsin Software package (Accelrys, Madison Wis.), using default parameters provided.

[0071] As used herein, “reference sequence” refers to a defined sequence used as a basis for a sequence and/or activity comparison. A reference sequence may be a subset of a larger sequence, for example, a segment of a full-length gene or polypeptide sequence. Generally, a reference sequence is at least 20 nucleotide or amino acid residues in length, at least 25 residues in length, at least 50 residues in length, at least 100 residues in length or the full length of the nucleic acid or polypeptide. Since two polynucleotides or polypeptides may each (1) comprise a sequence (i.e., a portion of the complete sequence) that is similar between the two sequences, and (2) may further comprise a sequence that is divergent between the two sequences, sequence comparisons between two (or more) polynucleotides or polypeptides are typically performed by comparing sequences of the two polynucleotides or polypeptides over a “comparison window” to identify and compare local regions of sequence similarity. In some embodiments, a “reference sequence” can be based on a primary amino acid sequence, where the reference sequence is a sequence that can have one or more changes in the primary sequence.

[0072] As used herein, “comparison window” refers to a conceptual segment of at least about 20 contiguous nucleotide positions or amino acid residues wherein a sequence may be compared to a reference sequence of at least 20 contiguous nucleotides or amino acids and wherein the portion of the sequence in the comparison window may comprise additions or deletions (i.e., gaps) of 20 percent or less as compared to the reference sequence (which does not comprise additions or deletions) for optimal alignment of the two sequences. The comparison window can be longer than 20 contiguous residues, and includes, optionally 30, 40, 50, 100, or longer windows.

[0073] As used herein, “corresponding to,” “reference to,” and “relative to” when used in the context of the numbering of a given amino acid or polynucleotide sequence refer to the numbering of the residues of a specified reference sequence when the given amino acid or polynucleotide sequence is compared to the reference sequence. In other words, the residue number or residue position of a given polymer is designated with respect to the reference sequence rather than by the actual numerical position of the residue within the given amino acid or polynucleotide sequence. For example, a given amino acid sequence, such as that of an engineered ERED or KRED, can be aligned to a reference sequence by introducing gaps to optimize residue matches between the two sequences. In these cases, although the gaps are present, the numbering of the residue in the given amino acid or polynucleotide sequence is made with respect to the reference sequence to which it has been aligned.

[0074] As used herein, “substantial identity” refers to a polynucleotide or polypeptide sequence that has at least 80 percent sequence identity, at least 85 percent identity, at least between 89 to 95 percent sequence identity, or more usually, at least 99 percent sequence identity as compared to a reference sequence over a comparison window of at least 20 residue positions, frequently over a window of at least 30-50 residues, wherein the percentage of sequence identity is calculated by comparing the reference sequence to a sequence that includes deletions or additions which total 20 percent or less of the reference sequence over the window of comparison. In some specific embodiments applied to polypeptides, the term “substantial identity” means that two polypeptide sequences, when optimally aligned, such as by the programs GAP or BESTFIT using default gap weights, share at least 80 percent sequence identity, preferably at least 89 percent sequence identity, at least 95 percent sequence identity or more (e.g., 99 percent sequence identity). In some embodiments, residue positions that are not identical in sequences being compared differ by conservative amino acid substitutions.

[0075] As used herein, “amino acid difference” and “residue difference” refer to a difference in the amino acid residue at a position of a polypeptide sequence relative to the amino acid residue at a corresponding position in a reference sequence. In some cases, the reference sequence has a histidine tag, but the numbering is maintained relative to the equivalent reference sequence without the histidine tag. The positions of amino acid differences generally are referred to herein as “Xn,” where n refers to the corresponding position in the reference sequence upon which the residue difference is based. For example, a “residue difference at position X93 as compared to SEQ ID NO:4” refers to a difference of the amino acid residue at the polypeptide position corresponding to position 93 of SEQ ID NO:4. Thus, if the reference polypeptide of SEQ ID NO:4 has a serine at position 93, then a “residue difference at position X93 as compared to SEQ ID NO:4” an amino acid substitution of any residue other than serine at the position of the polypeptide corresponding to position 93 of SEQ ID NO:4. In most instances herein, the specific amino acid residue difference at a position is indicated as “XnY” where “Xn” specified the corresponding position as described above, and “Y” is the single letter identifier of the amino acid found in the engineered polypeptide (i.e., the different residue than in the reference polypeptide). In some instances (e.g., in the Tables presented in the Examples), the present invention also provides specific amino acid differences denoted by the conventional notation “AnB”, where A is the single letter identifier of the residue in the reference sequence, “n” is the number of the residue position in the reference sequence, and B is the single letter identifier of the residue substitution in the sequence of the engineered polypeptide. In some instances, a polypeptide of the present invention can include one or more amino acid residue differences relative to a reference sequence, which is indicated by a list of the specified positions where residue differences are present relative to the reference sequence. In some embodiments, where more than one amino acid can be used in a specific residue position of a polypeptide, the various amino acid residues that can be used are separated by a “/” (e.g., X307H/X307P or X307H/P). The slash may also be used to indicate multiple substitutions within a given variant (i.e., there is more than one substitution present in a given sequence, such as in a combinatorial variant). In some embodiments, the present invention includes engineered polypeptide sequences comprising one or more amino acid differences comprising conservative or non-conservative amino acid substitutions. In some additional embodiments, the present invention provides engineered polypeptide sequences comprising both conservative and non-conservative amino acid substitutions.

[0076] As used herein, “conservative amino acid substitution” refers to a substitution of a residue with a different residue having a similar side chain, and thus typically involves substitution of the amino acid in the polypeptide with amino acids within the same or similar defined class of amino acids. By way of example and not limitation, in some embodiments, an amino acid with an aliphatic side chain is substituted with another aliphatic amino acid (e.g., alanine, valine, leucine, and isoleucine); an amino acid with an hydroxyl side chain is substituted with another amino acid with an hydroxyl side chain (e.g., serine and threonine); an amino acids having aromatic side chains is substituted with another amino acid having an aromatic side chain (e.g., phenylalanine, tyrosine, tryptophan, and histidine); an amino acid with a basic side chain is substituted with another amino acid with a basis side chain (e.g., lysine and arginine); an amino acid with an acidic side chain is substituted with another amino acid with an acidic side chain (e.g., aspartic acid or glutamic acid); and/or a hydrophobic or hydrophilic amino acid is replaced with another hydrophobic or hydrophilic amino acid, respectively.

[0077] As used herein, “non-conservative substitution” refers to substitution of an amino acid in the polypeptide with an amino acid with significantly differing side chain properties. Non-conservative substitutions may use amino acids between, rather than within, the defined groups and affects (a) the structure of the peptide backbone in the area of the substitution (e.g., proline for glycine) (b) the charge or hydrophobicity, or (c) the bulk of the side chain. By way of example and not limitation, an exemplary non-conservative substitution can be an acidic amino acid substituted with a basic or aliphatic amino acid; an aromatic amino acid substituted with a small amino acid; and a hydrophilic amino acid substituted with a hydrophobic amino acid.

[0078] As used herein, “deletion” refers to modification to the polypeptide by removal of one or more amino acids from the reference polypeptide. Deletions can comprise removal of 1 or more amino acids, 2 or more amino acids, 5 or more amino acids, 10 or more amino acids, 15 or more amino acids, or 20 or more amino acids, up to 10% of the total number of amino acids, or up to 20% of the total number of amino acids making up the reference enzyme while retaining enzymatic activity and/or retaining the improved properties of an engineered ERED or KRED enzyme. Deletions can be directed to the internal portions and/or terminal portions of the polypeptide. In various embodiments, the deletion can comprise a continuous segment or can be discontinuous. Deletions are typically indicated by “-” in amino acid sequences.

[0079] As used herein, “insertion” refers to modification to the polypeptide by addition of one or more amino acids from the reference polypeptide. Insertions can be in the internal portions of the polypeptide, or to the carboxy or amino terminus. Insertions as used herein include fusion proteins as is known in the art. The insertion can be a contiguous segment of amino acids or separated by one or more of the amino acids in the naturally occurring polypeptide.

[0080] The term “amino acid substitution set” or “substitution set” refers to a group of amino acid substitutions in a polypeptide sequence, as compared to a reference sequence. A substitution set can have 1, 2, 3, 4, 5, 6, 7, 8, 9, 10, 11, 12, 13, 14, 15, or more amino acid substitutions. In some embodiments, a substitution set refers to the set of amino acid substitutions that is present in any of the variant EREDs or KREDs listed in the Tables provided in the Examples

[0081] A “functional fragment” and “biologically active fragment” are used interchangeably herein to refer to a polypeptide that has an amino-terminal and/or carboxy-terminal deletion(s) and/or internal deletions, but where the remaining amino acid sequence is identical to the corresponding positions in the sequence to which it is being compared (e.g., a full-length engineered ERED or KRED of the present invention) and that retains substantially all of the activity of the full-length polypeptide.

[0082] As used herein, “isolated polypeptide” refers to a polypeptide which is substantially separated from other contaminants that naturally accompany it (e.g., protein, lipids, and polynucleotides). The term embraces polypeptides which have been removed or purified from their naturally occurring environment or expression system (e.g., within a host cell or via in vitro synthesis). The recombinant ERED or KRED polypeptides may be present within a cell, present in the cellular medium, or prepared in various forms, such as lysates or isolated preparations. As such, in some embodiments, the recombinant ERED or KRED polypeptides can be an isolated polypeptide.

[0083] As used herein, “substantially pure polypeptide” or “purified protein” refers to a composition in which the polypeptide species is the predominant species present (i.e., on a molar or weight basis it is more abundant than any other individual macromolecular species in the composition), and is generally a substantially purified composition when the object species comprises at least about 50 percent of the macromolecular species present by mole or % weight. However, in some embodiments, the composition comprising the ERED or KRED comprises the ERED or KRED that is less than 50% pure (e.g., about 10%, about 20%, about 30%, about 40%, or about 50%) Generally, a substantially pure ERED or KRED composition comprises about 60% or more, about 70% or more, about 80% or more, about 90% or more, about 95% or more, and about 98% or more of all macromolecular species by mole or % weight present in the composition. In some embodiments, the object species is purified to essential homogeneity (i.e., contaminant species cannot be detected in the composition by conventional detection methods) wherein the composition consists essentially of a single macromolecular species. Solvent species, small molecules (<500 Daltons), and elemental ion species are not considered macromolecular species. In some embodiments, the isolated recombinant ERED or KRED polypeptides are substantially pure polypeptide compositions.

[0084] As used herein, “stereoselectivity” refers to the preferential formation in a chemical or enzymatic reaction of one stereoisomer over another. Stereoselectivity can be partial, where the formation of one stereoisomer is favored over the other, or it may be complete where only one stereoisomer is formed. When the stereoisomers are enantiomers, the stereoselectivity is referred to as enantioselectivity, the fraction (typically reported as a percentage) of one enantiomer in the sum of both. It is commonly alternatively reported in the art (typically as a percentage) as the enantiomeric excess (e.e.) calculated therefrom according to the formula [major enantiomer−minor enantiomer]/[major enantiomer+minor enantiomer]. Where the stereoisomers are diastereoisomers, the stereoselectivity is referred to as diastereoselectivity, the fraction (typically reported as a percentage) of one diastereomer in a mixture of two diasteromers, commonly alternatively reported as the diastereomeric excess (d.e.). Enantiomeric excess and diastereomeric excess are types of stereomeric excess.

[0085] As used herein, “regioselectivity” and “regioselective reaction” refer to a reaction in which one direction of bond making or breaking occurs preferentially over all other possible directions. Reactions can completely (100%) regioselective if the discrimination is complete, substantially regioselective (at least 75%), or partially regioselective (x %, wherein the percentage is set dependent upon the reaction of interest), if the product of reaction at one site predominates over the product of reaction at other sites.

[0086] As used herein, “highly stereoselective” refers to an ERED or KRED polypeptide that is capable of converting or reducing the substrate to the corresponding product with at least about 85% stereomeric excess.

[0087] As used herein, “stereospecificity” refers to the preferential conversion in a chemical or enzymatic reaction of one stereoisomer over another. Stereospecificity can be partial, where the conversion of one stereoisomer is favored over the other, or it may be complete where only one stereoisomer is converted.

[0088] As used herein, “chemoselectivity” refers to the preferential formation in a chemical or enzymatic reaction of one product over another.

[0089] As used herein, “improved enzyme property” refers to at least one improved property of an enzyme. In some embodiments, the present invention provides engineered ERED or KRED polypeptides that exhibit an improvement in any enzyme property as compared to a reference ERED or KRED polypeptide and/or a wild-type ERED or KRED polypeptide, and/or another engineered ERED or KRED polypeptide. Thus, the level of “improvement” can be determined and compared between various ERED or KRED polypeptides, including wild-type, as well as engineered ERED or KRED polypeptides. Improved properties include, but are not limited, to such properties as increased protein expression, increased thermoactivity, increased thermostability, increased pH activity, increased stability, increased enzymatic activity, increased substrate specificity or affinity, increased specific activity, increased resistance to substrate or end-product inhibition, increased chemical stability, improved chemoselectivity, improved solvent stability, increased tolerance to acidic pH, increased tolerance to proteolytic activity (i.e., reduced sensitivity to proteolysis), reduced aggregation, increased solubility, and altered temperature profile. In additional embodiments, the term is used in reference to the at least one improved property of ERED or KRED enzymes. In some embodiments, the present invention provides engineered ERED or KRED polypeptides that exhibit an improvement in any enzyme property as compared to a reference ERED or KRED polypeptide and/or a wild-type ERED or KRED polypeptide, and/or another engineered ERED or KRED polypeptide. Thus, the level of “improvement” can be determined and compared between various ERED or KRED polypeptides, including wild-type, as well as engineered EREDs or KREDs.

[0090] As used herein, “increased enzymatic activity” and “enhanced catalytic activity” refer to an improved property of the engineered polypeptides, which can be represented by an increase in specific activity (e.g., product produced/time/weight protein) or an increase in percent conversion of the substrate to the product (e.g., percent conversion of starting amount of substrate to product in a specified time period using a specified amount of enzyme) as compared to the reference enzyme. In some embodiments, the terms refer to an improved property of engineered ERED or KRED polypeptides provided herein, which can be represented by an increase in specific activity (e.g., product produced/time/weight protein) or an increase in percent conversion of the substrate to the product (e.g., percent conversion of starting amount of substrate to product in a specified time period using a specified amount of ERED or KRED) as compared to the reference ERED or KRED enzyme. In some embodiments, the terms are used in reference to improved ERED or KRED enzymes provided herein. Exemplary methods to determine enzyme activity of the engineered ERED or KRED of the present invention are provided in the Examples. Any property relating to enzyme activity may be affected, including the classical enzyme properties of Kₘ, Vₘₐₓ or k_{cat}, changes of which can lead to increased enzymatic activity. For example, improvements in enzyme activity can be from about 1.1 fold the enzymatic activity of the corresponding wild-type enzyme, to as much as 2-fold, 5-fold, 10-fold, 20-fold, 25-fold, 50-fold, 75-fold, 100-fold, 150-fold, 200-fold or more enzymatic activity than the naturally occurring ERED or KRED or another engineered ERED or KRED from which the ERED or KRED polypeptides were derived.

[0091] As used herein, “conversion” refers to the enzymatic conversion (or biotransformation) of a substrate(s) to the corresponding product(s). “Percent conversion” refers to the percent of the substrate that is converted to the product within a period of time under specified conditions. Thus, the “enzymatic activity” or “activity” of an ERED or KRED polypeptide can be expressed as “percent conversion” of the substrate to the product in a specific period of time.

[0092] Enzymes with “generalist properties” (or “generalist enzymes”) refer to enzymes that exhibit improved activity for a wide range of substrates, as compared to a parental sequence. Generalist enzymes do not necessarily demonstrate improved activity for every possible substrate. In some embodiments, the present invention provides ERED or KRED variants with generalist properties, in that they demonstrate similar or improved activity relative to the parental gene for a wide range of sterically and electronically diverse substrates. In addition, the generalist enzymes provided herein were engineered to be improved across a wide range of diverse molecules to increase the production of metabolites/products.

[0093] The term “stringent hybridization conditions” is used herein to refer to conditions under which nucleic acid hybrids are stable. As known to those of skill in the art, the stability of hybrids is reflected in the melting temperature (Tₘ) of the hybrids. In general, the stability of a hybrid is a function of ion strength, temperature, G/C content, and the presence of chaotropic agents. The Tₘ values for polynucleotides can be calculated using known methods for predicting melting temperatures (See e.g., Baldino et al., Meth. Enzymol., 168:761-777 [1989]; Bolton et al., Proc. Natl. Acad. Sci. USA 48:1390 [1962]; Bresslauer et al., Proc. Natl. Acad. Sci. USA 83:8893-8897 [1986]; Freier et al., Proc. Natl. Acad. Sci. USA 83:9373-9377 [1986]; Kierzek et al., Biochem., 25:7840-7846 [1986]; Rychlik et al., Nucl. Acids Res., 18:6409-6412 [1990] (erratum, Nucl. Acids Res., 19:698 [1991]); Sambrook et al., supra); Suggs et al., 1981, in Developmental Biology Using Purified Genes, Brown et al. [eds.], pp. 683-693, Academic Press, Cambridge, Mass. [1981]; and Wetmur, Crit. Rev. Biochem. Mol. Biol. 26:227-259) [1991]. In some embodiments, the polynucleotide encodes the polypeptide disclosed herein and hybridizes under defined conditions, such as moderately stringent or highly stringent conditions, to the complement of a sequence encoding an engineered ERED or KRED enzyme of the present invention.

[0094] As used herein, “hybridization stringency” relates to hybridization conditions, such as washing conditions, in the hybridization of nucleic acids. Generally, hybridization reactions are performed under conditions of lower stringency, followed by washes of varying but higher stringency. The term “moderately stringent hybridization” refers to conditions that permit target-DNA to bind a complementary nucleic acid that has about 60% identity, preferably about 75% identity, about 85% identity to the target DNA, with greater than about 90% identity to target-polynucleotide. Exemplary moderately stringent conditions are conditions equivalent to hybridization in 50% formamide, 5× Denhart's solution, 5×SSPE, 0.2% SDS at 42° C., followed by washing in 0.2×SSPE, 0.2% SDS, at 42° C. “High stringency hybridization” refers generally to conditions that are about 10° C. or less from the thermal melting temperature Tₘ as determined under the solution condition for a defined polynucleotide sequence. In some embodiments, a high stringency condition refers to conditions that permit hybridization of only those nucleic acid sequences that form stable hybrids in 0.018M NaCl at 65° C. (i.e., if a hybrid is not stable in 0.018M NaCl at 65° C., it will not be stable under high stringency conditions, as contemplated herein). High stringency conditions can be provided, for example, by hybridization in conditions equivalent to 50% formamide, 5× Denhart's solution, 5×SSPE, 0.2% SDS at 42° C., followed by washing in 0.1×SSPE, and 0.1% SDS at 65° C. Another high stringency condition is hybridizing in conditions equivalent to hybridizing in 5×SSC containing 0.1% (w/v) SDS at 65° C. and washing in 0.1× SSC containing 0.1% SDS at 65° C. Other high stringency hybridization conditions, as well as moderately stringent conditions, are described in the references cited above.

[0095] As used herein, “codon optimized” refers to changes in the codons of the polynucleotide encoding a protein to those preferentially used in a particular organism such that the encoded protein is efficiently expressed in the organism of interest. Although the genetic code is degenerate in that most amino acids are represented by several codons, called “synonyms” or “synonymous” codons, it is well known that codon usage by particular organisms is nonrandom and biased towards particular codon triplets. This codon usage bias may be higher in reference to a given gene, genes of common function or ancestral origin, highly expressed proteins versus low copy number proteins, and the aggregate protein coding regions of an organism's genome. In some embodiments, the polynucleotides encoding the ERED or KRED enzymes may be codon optimized for optimal production in the host organism selected for expression.

[0096] As used herein, “preferred,” “optimal,” and “high codon usage bias” codons when used alone or in combination refer(s) interchangeably to codons that are used at higher frequency in the protein coding regions than other codons that code for the same amino acid. The preferred codons may be determined in relation to codon usage in a single gene, a set of genes of common function or origin, highly expressed genes, the codon frequency in the aggregate protein coding regions of the whole organism, codon frequency in the aggregate protein coding regions of related organisms, or combinations thereof. Codons whose frequency increases with the level of gene expression are typically optimal codons for expression. A variety of methods are known for determining the codon frequency (e.g., codon usage, relative synonymous codon usage) and codon preference in specific organisms, including multivariate analysis, for example, using cluster analysis or correspondence analysis, and the effective number of codons used in a gene (See e.g., GCG CodonPreference, Genetics Computer Group Wisconsin Package; CodonW, Peden, University of Nottingham; McInerney, Bioinform., 14:372-73 [1998]; Stenico et al., Nucl. Acids Res., 222437-46 [1994]; and Wright, Gene 87:23-29 [1990]). Codon usage tables are available for many different organisms (See e.g., Wada et al., Nucl. Acids Res., 20:2111-2118 [1992]; Nakamura et al., Nucl. Acids Res., 28:292 [2000]; Duret, et al., supra; Henaut and Danchin, in Escherichia coli and Salmonella, Neidhardt, et al. (eds.), ASM Press, Washington D.C., p. 2047-2066 [1996]). The data source for obtaining codon usage may rely on any available nucleotide sequence capable of coding for a protein. These data sets include nucleic acid sequences actually known to encode expressed proteins (e.g., complete protein coding sequences-CDS), expressed sequence tags (ESTS), or predicted coding regions of genomic sequences (See e.g., Mount, Bioinformatics: Sequence and Genome Analysis, Chapter 8, Cold Spring Harbor Laboratory Press, Cold Spring Harbor, N.Y. [2001]; Uberbacher, Meth. Enzymol., 266:259-281 [1996]; and Tiwari et al., Comput. Appl. Biosci., 13:263-270 [1997]).

[0097] As used herein, “control sequence” includes all components, which are necessary or advantageous for the expression of a polynucleotide and/or polypeptide of the present invention. Each control sequence may be native or foreign to the nucleic acid sequence encoding the polypeptide. Such control sequences include, but are not limited to, a leader, polyadenylation sequence, propeptide sequence, promoter sequence, signal peptide sequence, initiation sequence and transcription terminator. At a minimum, the control sequences include a promoter, and transcriptional and translational stop signals. The control sequences may be provided with linkers for the purpose of introducing specific restriction sites facilitating ligation of the control sequences with the coding region of the nucleic acid sequence encoding a polypeptide.

[0098] “Operably linked” is defined herein as a configuration in which a control sequence is appropriately placed (i.e., in a functional relationship) at a position relative to a polynucleotide of interest such that the control sequence directs or regulates the expression of the polynucleotide and/or polypeptide of interest.

[0099] “Promoter sequence” refers to a nucleic acid sequence that is recognized by a host cell for expression of a polynucleotide of interest, such as a coding sequence. The promoter sequence contains transcriptional control sequences, which mediate the expression of a polynucleotide of interest. The promoter may be any nucleic acid sequence which shows transcriptional activity in the host cell of choice including mutant, truncated, and hybrid promoters, and may be obtained from genes encoding extracellular or intracellular polypeptides either homologous or heterologous to the host cell.

[0100] The phrase “suitable reaction conditions” refers to those conditions in the enzymatic conversion reaction solution (e.g., ranges of enzyme loading, substrate loading, temperature, pH, buffers, co-solvents, etc.) under which an ERED or KRED polypeptide of the present invention is capable of converting a substrate to the desired product compound. Some exemplary “suitable reaction conditions” are provided herein.

[0101] As used herein, “loading,” such as in “compound loading” or “enzyme loading” refers to the concentration or amount of a component in a reaction mixture at the start of the reaction.

[0102] As used herein, “substrate” in the context of an enzymatic conversion reaction process refers to the compound or molecule acted on by the engineered enzymes provided herein (e.g., engineered ERED or KRED polypeptides).

[0103] As used herein, “increasing” yield of a product (e.g., the acid of compound 3) from a reaction occurs when a particular component present during the reaction (e.g., an ERED or KRED enzyme) causes more product to be produced, compared with a reaction conducted under the same conditions with the same substrate and other substituents, but in the absence of the component of interest.

[0104] A reaction is said to be “substantially free” of a particular enzyme if the amount of that enzyme compared with other enzymes that participate in catalyzing the reaction is less than about 2%, about 1%, or about 0.1% (wt/wt).

[0105] As used herein, “fractionating” a liquid (e.g., a culture broth) means applying a separation process (e.g., salt precipitation, column chromatography, size exclusion, and filtration) or a combination of such processes to provide a solution in which a desired protein comprises a greater percentage of total protein in the solution than in the initial liquid product.

[0106] As used herein, “starting composition” refers to any composition that comprises at least one substrate. In some embodiments, the starting composition comprises any suitable substrate.

[0107] As used herein, “product” in the context of an enzymatic conversion process refers to the compound or molecule resulting from the action of an enzymatic polypeptide on a substrate.

[0108] As used herein, “equilibration” as used herein refers to the process resulting in a steady state concentration of chemical species in a chemical or enzymatic reaction (e.g., interconversion of two species A and B), including interconversion of stereoisomers, as determined by the forward rate constant and the reverse rate constant of the chemical or enzymatic reaction.

[0109] As used herein, “alkyl” refers to saturated hydrocarbon groups of from 1 to 18 carbon atoms inclusively, either straight chained or branched, more preferably from 1 to 8 carbon atoms inclusively, and most preferably 1 to 6 carbon atoms inclusively. An alkyl with a specified number of carbon atoms is denoted in parenthesis (e.g., (C1-C4)alkyl refers to an alkyl of 1 to 4 carbon atoms).

[0110] As used herein, “alkenyl” refers to groups of from 2 to 12 carbon atoms inclusively, either straight or branched containing at least one double bond but optionally containing more than one double bond.

[0111] As used herein, “alkynyl” refers to groups of from 2 to 12 carbon atoms inclusively, either straight or branched containing at least one triple bond but optionally containing more than one triple bond, and additionally optionally containing one or more double bonded moieties.

[0112] As used herein, “heteroalkyl, “heteroalkenyl,” and heteroalkynyl,” refer to alkyl, alkenyl and alkynyl as defined herein in which one or more of the carbon atoms are each independently replaced with the same or different heteroatoms or heteroatomic groups. Heteroatoms and/or heteroatomic groups which can replace the carbon atoms include, but are not limited to, —O—, —S—, —S—O—, —NRa—, —PH—, —S(O)—, —S(O)2-, —S(O) NRα-, —S(O)2NRα-, and the like, including combinations thereof, where each Ra is independently selected from hydrogen, alkyl, heteroalkyl, cycloalkyl, heterocycloalkyl, aryl, and heteroaryl.

[0113] As used herein, “alkoxy” refers to the group —ORβ wherein R β is an alkyl group is as defined above including optionally substituted alkyl groups as also defined herein.

[0114] As used herein, “aryl” refers to an unsaturated aromatic carbocyclic group of from 6 to 12 carbon atoms inclusively having a single ring (e.g., phenyl) or multiple condensed rings (e.g., naphthyl or anthryl). Exemplary aryls include phenyl, pyridyl, naphthyl and the like.

[0115] As used herein, “amino” refers to the group —NH2. Substituted amino refers to the group —NHRδ, NRδRδ, and NRδRδRδ, where each Rδ is independently selected from substituted or unsubstituted alkyl, cycloalkyl, cycloheteroalkyl, alkoxy, aryl, heteroaryl, heteroarylalkyl, acyl, alkoxycarbonyl, sulfanyl, sulfinyl, sulfonyl, and the like. Typical amino groups include, but are limited to, dimethylamino, diethylamino, trimethylammonium, triethylammonium, methylysulfonylamino, furanyl-oxy-sulfamino, and the like.

[0116] As used herein, “oxo” refers to ═O.

[0117] As used herein, “oxy” refers to a divalent group —O—, which may have various substituents to form different oxy groups, including ethers and esters.

[0118] As used herein, “carboxy” refers to —COOH.

[0119] As used herein, “carbonyl” refers to —C(O)—, which may have a variety of substituents to form different carbonyl groups including acids, acid halides, aldehydes, amides, esters, and ketones.

[0120] As used herein, “alkyloxycarbonyl” refers to —C(O)ORε, where Rε is an alkyl group as defined herein, which can be optionally substituted.

[0121] As used herein, “aminocarbonyl” refers to —C(O)NH2. Substituted aminocarbonyl refers to —C(O)NRδRδ, where the amino group NRδRδ is as defined herein.

[0122] As used herein, “halogen” and “halo” refer to fluoro, chloro, bromo and iodo.

[0123] As used herein, “hydroxy” refers to —OH.

[0124] As used herein, “cyano” refers to —CN.

[0125] As used herein, “heteroaryl” refers to an aromatic heterocyclic group of from 1 to 10 carbon atoms inclusively and 1 to 4 heteroatoms inclusively selected from oxygen, nitrogen and sulfur within the ring. Such heteroaryl groups can have a single ring (e.g., pyridyl or furyl) or multiple condensed rings (e.g., indolizinyl or benzothienyl).

[0126] As used herein, “heteroarylalkyl” refers to an alkyl substituted with a heteroaryl (i.e., heteroaryl-alkyl- groups), preferably having from 1 to 6 carbon atoms inclusively in the alkyl moiety and from 5 to 12 ring atoms inclusively in the heteroaryl moiety. Such heteroarylalkyl groups are exemplified by pyridylmethyl and the like.

[0127] As used herein, “heteroarylalkenyl” refers to an alkenyl substituted with a heteroaryl (i.e., heteroaryl-alkenyl- groups), preferably having from 2 to 6 carbon atoms inclusively in the alkenyl moiety and from 5 to 12 ring atoms inclusively in the heteroaryl moiety.

[0128] As used herein, “heteroarylalkynyl” refers to an alkynyl substituted with a heteroaryl (i.e., heteroaryl-alkynyl- groups), preferably having from 2 to 6 carbon atoms inclusively in the alkynyl moiety and from 5 to 12 ring atoms inclusively in the heteroaryl moiety.

[0129] As used herein, “heterocycle,” “heterocyclic,” and interchangeably “heterocycloalkyl,” refer to a saturated or unsaturated group having a single ring or multiple condensed rings, from 2 to 10 carbon ring atoms inclusively and from 1 to 4 hetero ring atoms inclusively selected from nitrogen, sulfur or oxygen within the ring. Such heterocyclic groups can have a single ring (e.g., piperidinyl or tetrahydrofuryl) or multiple condensed rings (e.g., indolinyl, dihydrobenzofuran or quinuclidinyl). Examples of heterocycles include, but are not limited to, furan, thiophene, thiazole, oxazole, pyrrole, imidazole, pyrazole, pyridine, pyrazine, pyrimidine, pyridazine, indolizine, isoindole, indole, indazole, purine, quinolizine, isoquinoline, quinoline, phthalazine, naphthylpyridine, quinoxaline, quinazoline, cinnoline, pteridine, carbazole, carboline, phenanthridine, acridine, phenanthroline, isothiazole, phenazine, isoxazole, phenoxazine, phenothiazine, imidazolidine, imidazoline, piperidine, piperazine, pyrrolidine, indoline and the like.

[0130] As used herein, “membered ring” is meant to embrace any cyclic structure. The number preceding the term “membered” denotes the number of skeletal atoms that constitute the ring. Thus, for example, cyclohexyl, pyridine, pyran and thiopyran are 6-membered rings and cyclopentyl, pyrrole, furan, and thiophene are 5-membered rings.

[0131] Unless otherwise specified, positions occupied by hydrogen in the foregoing groups can be further substituted with substituents exemplified by, but not limited to, hydroxy, oxo, nitro, methoxy, ethoxy, alkoxy, substituted alkoxy, trifluoromethoxy, haloalkoxy, fluoro, chloro, bromo, iodo, halo, methyl, ethyl, propyl, butyl, alkyl, alkenyl, alkynyl, substituted alkyl, trifluoromethyl, haloalkyl, hydroxyalkyl, alkoxyalkyl, thio, alkylthio, acyl, carboxy, alkoxycarbonyl, carboxamido, substituted carboxamido, alkylsulfonyl, alkylsulfinyl, alkylsulfonylamino, sulfonamido, substituted sulfonamido, cyano, amino, substituted amino, alkylamino, dialkylamino, aminoalkyl, acylamino, amidino, amidoximo, hydroxamoyl, phenyl, aryl, substituted aryl, aryloxy, arylalkyl, arylalkenyl, arylalkynyl, pyridyl, imidazolyl, heteroaryl, substituted heteroaryl, heteroaryloxy, heteroarylalkyl, heteroarylalkenyl, heteroarylalkynyl, cyclopropyl, cyclobutyl, cyclopentyl, cyclohexyl, cycloalkyl, cycloalkenyl, cycloalkylalkyl, substituted cycloalkyl, cycloalkyloxy, pyrrolidinyl, piperidinyl, morpholino, heterocycle, (heterocycle)oxy, and (heterocycle)alkyl; and preferred heteroatoms are oxygen, nitrogen, and sulfur. It is understood that where open valences exist on these substituents they can be further substituted with alkyl, cycloalkyl, aryl, heteroaryl, and/or heterocycle groups, that where these open valences exist on carbon they can be further substituted by halogen and by oxygen-, nitrogen-, or sulfur-bonded substituents, and where multiple such open valences exist, these groups can be joined to form a ring, either by direct formation of a bond or by formation of bonds to a new heteroatom, preferably oxygen, nitrogen, or sulfur. It is further understood that the above substitutions can be made provided that replacing the hydrogen with the substituent does not introduce unacceptable instability to the molecules of the present invention, and is otherwise chemically reasonable.

[0132] As used herein the term “culturing” refers to the growing of a population of microbial cells under any suitable conditions (e.g., using a liquid, gel or solid medium).

[0133] Recombinant polypeptides can be produced using any suitable methods known in the art. Genes encoding the wild-type polypeptide of interest or another engineered polypeptide or reference polypeptide can be cloned in vectors, such as plasmids, and expressed in desired hosts, such as E. coli, etc. Variants of recombinant polypeptides can be generated by various methods known in the art. Indeed, there is a wide variety of different mutagenesis techniques well known to those skilled in the art. In addition, mutagenesis kits are also available from many commercial molecular biology suppliers. Methods are available to make specific substitutions at defined amino acids (site-directed), specific or random mutations in a localized region of the gene (regio-specific), or random mutagenesis over the entire gene (e.g., saturation mutagenesis). Numerous suitable methods are known to those in the art to generate enzyme variants, including but not limited to site-directed mutagenesis of single-stranded DNA or double-stranded DNA using PCR, cassette mutagenesis, gene synthesis, error-prone PCR, shuffling, and chemical saturation mutagenesis, or any other suitable method known in the art. Mutagenesis and directed evolution methods can be readily applied to enzyme-encoding polynucleotides to generate variant libraries that can be expressed, screened, and assayed. Any suitable mutagenesis and directed evolution methods find use in the present invention and are well known in the art (See e.g., U.S. Pat. Nos. 5,605,793, 5,811,238, 5,830,721, 5,834,252, 5,837,458, 5,928,905, 6,096,548, 6,117,679, 6,132,970, 6,165,793, 6,180,406, 6,251,674, 6,265,201, 6,277,638, 6,287,861, 6,287,862, 6,291,242, 6,297,053, 6,303,344, 6,309,883, 6,319,713, 6,319,714, 6,323,030, 6,326,204, 6,335,160, 6,335,198, 6,344,356, 6,352,859, 6,355,484, 6,358,740, 6,358,742, 6,365,377, 6,365,408, 6,368,861, 6,372,497, 6,337,186, 6,376,246, 6,379,964, 6,387,702, 6,391,552, 6,391,640, 6,395,547, 6,406,855, 6,406,910, 6,413,745, 6,413,774, 6,420,175, 6,423,542, 6,426,224, 6,436,675, 6,444,468, 6,455,253, 6,479,652, 6,482,647, 6,483,011, 6,484,105, 6,489,146, 6,500,617, 6,500,639, 6,506,602, 6,506,603, 6,518,065, 6,519,065, 6,521,453, 6,528,311, 6,537,746, 6,573,098, 6,576,467, 6,579,678, 6,586,182, 6,602,986, 6,605,430, 6,613,514, 6,653,072, 6,686,515, 6,703,240, 6,716,631, 6,825,001, 6,902,922, 6,917,882, 6,946,296, 6,961,664, 6,995,017, 7,024,312, 7,058,515, 7,105,297, 7,148,054, 7,220,566, 7,288,375, 7,384,387, 7,421,347, 7,430,477, 7,462,469, 7,534,564, 7,620,500, 7,620,502, 7,629,170, 7,702,464, 7,747,391, 7,747,393, 7,751,986, 7,776,598, 7,783,428, 7,795,030, 7,853,410, 7,868,138, 7,783,428, 7,873,477, 7,873,499, 7,904,249, 7,957,912, 7,981,614, 8,014,961, 8,029,988, 8,048,674, 8,058,001, 8,076,138, 8,108,150, 8,170,806, 8,224,580, 8,377,681, 8,383,346, 8,457,903, 8,504,498, 8,589,085, 8,762,066, 8,768,871, 9,593,326, 9,665,694, 9,684,771, and all related US, as well as PCT and non-US counterparts; Ling et al., Anal. Biochem., 254(2):157-78 [1997]; Dale et al., Meth. Mol. Biol., 57:369-74 [1996]; Smith, Ann. Rev. Genet., 19:423-462 [1985]; Botstein et al., Science, 229:1193-1201 [1985]; Carter, Biochem. J., 237:1-7 [1986]; Kramer et al., Cell, 38:879-887 [1984]; Wells et al., Gene, 34:315-323 [1985]; Minshull et al., Curr. Op. Chem. Biol., 3:284-290 [1999]; Christians et al., Nat. Biotechnol., 17:259-264 [1999]; Crameri et al., Nature, 391:288-291 [1998]; Crameri, et al., Nat. Biotechnol., 15:436-438 [1997]; Zhang et al., Proc. Nat. Acad. Sci. U.S.A., 94:4504-4509 [1997]; Crameri et al., Nat. Biotechnol., 14:315-319 [1996]; Stemmer, Nature, 370:389-391 [1994]; Stemmer, Proc. Nat. Acad. Sci. USA, 91:10747-10751 [1994]; WO 95/22625; WO 97/0078; WO 97/35966; WO 98/27230; WO 00/42651; WO 01/75767; and WO 2009/152336, all of which are incorporated herein by reference).

[0134] In some embodiments, the enzyme clones obtained following mutagenesis treatment are screened by subjecting the enzyme preparations to a defined temperature (or other assay conditions) and measuring the amount of enzyme activity remaining after heat treatments or other suitable assay conditions. Clones containing a polynucleotide encoding a polypeptide are then isolated from the gene, sequenced to identify the nucleotide sequence changes (if any), and used to express the enzyme in a host cell. Measuring enzyme activity from the expression libraries can be performed using any suitable method known in the art (e.g., standard biochemistry techniques, such as HPLC analysis).

[0135] After the variants are produced, they can be screened for any desired property (e.g., high or increased activity, or low or reduced activity, increased thermal activity, increased thermal stability, and/or acidic pH stability, etc.). In some embodiments, “recombinant enone reductase polypeptides” (also referred to herein as “engineered enone reductase polypeptides,” “variant enone reductase enzymes,” “enone reductase variants,” and “enone reductase combinatorial variants”) find use. In some embodiments, “recombinant ketoreductase polypeptides” (also referred to herein as “engineered ketoreductase polypeptides,” “variant ketoreductase enzymes,” “ketoreductase variants,” and “ketoreductase combinatorial variants”) find use.

[0136] As used herein, a “vector” is a DNA construct for introducing a DNA sequence into a cell. In some embodiments, the vector is an expression vector that is operably linked to a suitable control sequence capable of effecting the expression in a suitable host of the polypeptide encoded in the DNA sequence. In some embodiments, an “expression vector” has a promoter sequence operably linked to the DNA sequence (e.g., transgene) to drive expression in a host cell, and in some embodiments, also comprises a transcription terminator sequence.

[0137] As used herein, the term “expression” includes any step involved in the production of the polypeptide including, but not limited to, transcription, post-transcriptional modification, translation, and post-translational modification. In some embodiments, the term also encompasses secretion of the polypeptide from a cell.

[0138] As used herein, the term “produces” refers to the production of proteins and/or other compounds by cells. It is intended that the term encompass any step involved in the production of polypeptides including, but not limited to, transcription, post-transcriptional modification, translation, and post-translational modification. In some embodiments, the term also encompasses secretion of the polypeptide from a cell.

[0139] As used herein, an amino acid or nucleotide sequence (e.g., a promoter sequence, signal peptide, terminator sequence, etc.) is “heterologous” to another sequence with which it is operably linked if the two sequences are not associated in nature. For example, a “heterologous polynucleotide” is any polynucleotide that is introduced into a host cell by laboratory techniques, and includes polynucleotides that are removed from a host cell, subjected to laboratory manipulation, and then reintroduced into a host cell.

[0140] As used herein, the terms “host cell” and “host strain” refer to suitable hosts for expression vectors comprising DNA provided herein (e.g., the polynucleotides encoding the ERED or KRED variants). In some embodiments, the host cells are prokaryotic or eukaryotic cells that have been transformed or transfected with vectors constructed using recombinant DNA techniques as known in the art.

[0141] The term “analogue” means a polypeptide having more than 70% sequence identity but less than 100% sequence identity (e.g., more than 75%, 78%, 80%, 83%, 85%, 88%, 90%, 91%, 92%, 93%, 94%, 95%, 96%, 97%, 98%, 99% sequence identity) with a reference polypeptide. In some embodiments, analogues means polypeptides that contain one or more non-naturally occurring amino acid residues including, but not limited, to homoarginine, ornithine and norvaline, as well as naturally occurring amino acids. In some embodiments, analogues also include one or more D-amino acid residues and non-peptide linkages between two or more amino acid residues.

[0142] The term “effective amount” means an amount sufficient to produce the desired result. One of general skill in the art may determine the effective amount by using routine experimentation.

[0143] The terms “isolated” and “purified” are used to refer to a molecule (e.g., an isolated nucleic acid, polypeptide, etc.) or other component that is removed from at least one other component with which it is naturally associated. The term “purified” does not require absolute purity, rather it is intended as a relative definition.

[0144] As used herein, “pH stable” refers to an ERED or KRED polypeptide that maintains similar activity (e.g., more than 60% to 80%) after exposure to high or low pH (e.g., 4.5-6 or 8 to 12) for a period of time (e.g., 0.5-24 hrs) compared to the untreated enzyme.

[0145] As used herein, “thermostable” refers to an ERED or KRED polypeptide that maintains similar activity (more than 60% to 80% for example) after exposure to elevated temperatures (e.g., 40-80° C.) for a period of time (e.g., 0.5-24 h) compared to the wild-type enzyme or another engineered enzyme or reference enzyme exposed to the same elevated temperature.

[0146] As used herein, “solvent stable” refers to an ERED or KRED polypeptide that maintains similar activity (more than e.g., 60% to 80%) after exposure to varying concentrations (e.g., 5-99%) of solvent (ethanol, isopropyl alcohol, dimethylsulfoxide [DMSO], tetrahydrofuran, 2-methyltetrahydrofuran, acetone, toluene, butyl acetate, methyl tert-butyl ether, etc.) for a period of time (e.g., 0.5-24 h) compared to the wild-type enzyme or another engineered enzyme or reference enzyme exposed to the same concentration of the same solvent.

[0147] As used herein, “thermo- and solvent stable” refers to an ERED or KRED polypeptide that is both thermostable and solvent stable.

[0148] As used herein, “optional” and “optionally” mean that the subsequently described event or circumstance may or may not occur, and that the description includes instances where the event or circumstance occurs and instances in which it does not. One of ordinary skill in the art would understand that with respect to any molecule described as containing one or more optional substituents, only sterically practical and/or synthetically feasible compounds are meant to be included.

[0149] As used herein, “optionally substituted” refers to all subsequent modifiers in a term or series of chemical groups. For example, in the term “optionally substituted arylalkyl, the “alkyl” portion and the “aryl” portion of the molecule may or may not be substituted, and for the series “optionally substituted alkyl, cycloalkyl, aryl and heteroaryl,” the alkyl, cycloalkyl, aryl, and heteroaryl groups, independently of the others, may or may not be substituted.

### DETAILED DESCRIPTION OF THE INVENTION

[0150] The present disclosure provides engineered enone reductase enzymes (EREDs), polypeptides having ERED activity, and polynucleotides encoding these enzymes, as well as vectors and host cells comprising these polynucleotides and polypeptides. Methods for producing ERED enzymes are also provided. The present disclosure also provides engineered ketoreductase enzymes (KREDs), polypeptides having KRED activity, and polynucleotides encoding these enzymes, as well as vectors and host cells comprising these polynucleotides and polypeptides. Methods for producing KRED enzymes are also provided. The present disclosure further provides compositions comprising the ERED and KRED enzymes and methods of using the engineered ERED and KRED enzymes. The present disclosure finds particular use in the production of pharmaceutical compounds.

[0151] In some embodiments, the present invention provides enzymes suitable for reduction of certain enone compounds, as depicted in Scheme 1.

[chemical structure]

[0152] The ERED catalyzes the reduction of the enone substrate of compound (1) using NADPH as a cofactor, to the intermediate acid of compound (2). The intermediate compound (2) is then converted to the alcohol product of compound (3) by a KRED enzyme. The KRED enzyme also recycles oxidized NADP⁺ to NADPH, using the reversible conversion of isopropanol to acetone.

[0153] Glucose dehydrogenase (GDH) can also be used to recycle NADP to NADPH, using the conversion glucose to gluconate, according to Scheme 2.

[chemical structure]

The coupled reaction of Schemes 1 and 2 are comprised of the ERED and KRED reactions depicted in Scheme 3 and Scheme 4, respectively.

[chemical structure]

[0154] Various stereoisomers of compound (2) and compound (3) are possible from the coupled reaction. The ERED half reaction (Scheme 3) may produce the R acid (undesired) or S acid (compound (2)). KRED enzymes also create chiral S and R alcohol products. In Examples 3-9 of the present disclosure, KRED P2-G03 (Codexis, Inc.) was used to select for the S product (>99% e.e.). Thus, the stereoselectivity of an ERED in the coupled reaction can be measured through the proportion of cis-3 or trans-3 in the final alcohol product, according the Scheme 5, below. This allowed selection for desired trans-3/S-2 selectivity during the ERED evolution to achieve the desired alcohol product of compound (3).

[chemical structure]

[0155] The coupled reaction may also lead to an undesired side reaction if the KRED acts directly on enone compound (1), rather than intermediate acid compound (2). This side reaction, depicted below in Scheme 6, produces the allylic alcohol of compound (4).

[chemical structure]

[0156] The present invention was developed in order to address the potential use of ERED and KRED enzymes to produce compound (3) with increased substrate conversion, reduced side reactivity, and increased stereoselectivity. In some embodiments, the present disclosure provides ERED and KRED enzymes that are useful in optimizing production of compound (2) and/or compound (3).

### Engineered ERED and KRED Polypeptides

[0157] The present invention provides engineered ERED and KRED polypeptides, polynucleotides encoding the polypeptides, methods of preparing the polypeptides, and methods for using the polypeptides. Where the description relates to polypeptides, it is to be understood that it also describes the polynucleotides encoding the polypeptides. In some embodiments, the present invention provides engineered, non-naturally occurring ERED and KRED enzymes with improved properties as compared to wild-type ERED and KRED enzymes or other engineered enzymes or reference enzymes. Any suitable reaction conditions find use in the present invention. In some embodiments, methods are used to analyze the improved properties of the engineered polypeptides to carry out the ERED reaction. In some embodiments, methods are used to analyze the improved properties of the engineered polypeptides to carry out the KRED reaction. In some embodiments, the reaction conditions are modified with regard to concentrations or amounts of engineered EREDs, engineered KREDs, substrate(s), buffer(s), solvent(s), pH, conditions including temperature and reaction time, and/or conditions with the engineered ERED and/or KRED polypeptide immobilized on a solid support, as further described below and in the Examples.

[0158] As will be appreciated by the skilled artisan, in some embodiments, one or a combination of residue differences above (Summary of Invention) that is selected can be kept constant (i.e., maintained) in the engineered ERED and/or KRED as a core feature, and additional residue differences at other residue positions incorporated into the sequence to generate additional engineered ERED and/or KRED polypeptides with improved properties. Accordingly, it is to be understood for any engineered ERED and/or KRED containing one or a subset of the residue differences above, the present invention contemplates other engineered ERED and/or KRED that comprise the one or subset of the residue differences, and additionally one or more residue differences at the other residue positions disclosed herein.

[0159] As noted above, the engineered ERED and/or KRED polypeptides are also capable of converting substrates (e.g., compound (1) to compound (2) and compound (2) to compound (3)). In some embodiments, the engineered ERED and/or KRED polypeptide is capable of converting the substrate compounds to the product compound with at least 1.2 fold, 1.5 fold, 2 fold, 3 fold, 4 fold, 5 fold, 10 fold, 20 fold, 30 fold, 40 fold, 50 fold, 60 fold, 70 fold, 80 fold, 90 fold, 100 fold, or more activity relative to the activity of the reference polypeptide of SEQ ID NOs: 10, 20, 162, 262, 282, 294, 322, 346, 432, and/or 476.

[0160] In some embodiments, the engineered ERED polypeptide capable of converting the substrate compounds to the product compounds with at least 2 fold the activity relative to SEQ ID NOs: 10, 20, 162, 262, 282, 294, 322, and/or 346, comprises an amino acid sequence selected from the even-numbered sequences in SEQ ID NOs: 12-430.

[0161] In some embodiments, the engineered KRED polypeptide capable of converting the substrate compounds to the product compounds with at least 2 fold the activity relative to SEQ ID NOs: 432 and/or 476, comprises an amino acid sequence selected from the even-numbered sequences in SEQ ID NOs: 434-524.

[0162] In some embodiments, the engineered ERED has an amino acid sequence comprising one or more residue differences as compared to SEQ ID NOs: 10, 20, 162, 262, 282, 294, 322, and/or 346, increases expression of the engineered ERED activity in a bacterial host cell, particularly in E. coli.

[0163] In some embodiments, the engineered KRED has an amino acid sequence comprising one or more residue differences as compared to SEQ ID NOs: 432 and/or 476, increases expression of the engineered KRED activity in a bacterial host cell, particularly in E. coli.

[0164] In some embodiments, the engineered ERED and/or KRED polypeptide with improved properties has an amino acid sequence comprising a sequence selected from the even-numbered sequences in the range of SEQ ID NOs: 12-430 and 434-524.

[0165] In some embodiments, the engineered ERED, comprises an amino acid sequence having at least 80%, 85%, 86%, 87%, 88%, 89%, 90%, 91%, 92%, 93%, 94%, 95%, 96%, 97%, 98%, or 99% identity to one of the even-numbered sequences in the range of SEQ ID NOs: 12-430, and the amino acid residue differences as compared to SEQ ID NOs: 10, 20, 162, 262, 282, 294, 322, and/or 346, present in any one of the even-numbered sequences in the range of SEQ ID NOs: 12-430, as provided in the Examples.

[0166] In some embodiments, the engineered KRED, comprises an amino acid sequence having at least 80%, 85%, 86%, 87%, 88%, 89%, 90%, 91%, 92%, 93%, 94%, 95%, 96%, 97%, 98%, or 99% identity to one of the even-numbered sequences in the range of SEQ ID NOs: 434-524, and the amino acid residue differences as compared to NOs: 432 and/or 476, present in any one of the even-numbered sequences in the range of SEQ ID NOs: 434-524, as provided in the Examples.

[0167] In addition to the residue positions specified above, any of the engineered ERED and/or KRED polypeptides disclosed herein can further comprise other residue differences relative to SEQ ID NOs: 10, 20, 162, 262, 282, 294, 322, 346, 432, and/or 476, at other residue positions (i.e., residue positions other than those included herein). Residue differences at these other residue positions can provide for additional variations in the amino acid sequence without adversely affecting the ability of the polypeptide to carry out the conversion of substrate to product. Accordingly, in some embodiments, in addition to the amino acid residue differences present in any one of the engineered ERED and/or KRED polypeptides selected from the even-numbered sequences in the range of SEQ ID NOs: 12-430 and 434-524, the sequence can further comprise 1-2, 1-3, 1-4, 1-5, 1-6, 1-7, 1-8, 1-9, 1-10, 1-11, 1-12, 1-14, 1-15, 1-16, 1-18, 1-20, 1-22, 1-24, 1-26, 1-30, 1-35, 1-40, 1-45, or 1-50 residue differences at other amino acid residue positions as compared to the SEQ ID NOs: 10, 20, 162, 262, 282, 294, 322, 346, 432, and/or 476. In some embodiments, the number of amino acid residue differences as compared to the reference sequence can be 1, 2, 3, 4, 5, 6, 7, 8, 9, 10, 11, 12, 13, 14, 15, 16, 17, 18, 19, 20, 21, 22, 23, 24, 25, 30, 30, 35, 40, 45 or 50 residue positions. In some embodiments, the number of amino acid residue differences as compared to the reference sequence can be 1, 2, 3, 4, 5, 6, 7, 8, 9, 10, 11, 12, 13, 14, 15, 16, 18, 20, 21, 22, 23, 24, or 25 residue positions. The residue differences at these other positions can be conservative changes or non-conservative changes. In some embodiments, the residue differences can comprise conservative substitutions and non-conservative substitutions as compared to the ERED and/or KRED polypeptide of SEQ ID NOs: 10, 20, 162, 262, 282, 294, 322, 346, 432, and/or 476.

[0168] In some embodiments, the present invention also provides engineered polypeptides that comprise a fragment of any of the engineered ERED and/or KRED polypeptides described herein that retains the functional activity and/or improved property of that engineered ERED and/or KRED. Accordingly, in some embodiments, the present invention provides a polypeptide fragment capable of converting substrate to product under suitable reaction conditions, wherein the fragment comprises at least about 90%, 95%, 96%, 97%, 98%, or 99% of a full-length amino acid sequence of an engineered ERED and/or KRED of the present invention, such as an exemplary engineered ERED and/or KRED polypeptide selected from the even-numbered sequences in the range of SEQ ID NOs: 12-430 and 434-524. In some embodiments, the engineered ERED and/or KRED can have an amino acid sequence comprising a deletion in any one of the ERED and/or KRED polypeptide sequences described herein, such as the exemplary engineered polypeptides of the even-numbered sequences in the range of SEQ ID NOs: 12-430 and 434-524.

[0169] Thus, for each and every embodiment of the engineered ERED and/or KRED polypeptides of the invention, the amino acid sequence can comprise deletions of one or more amino acids, 2 or more amino acids, 3 or more amino acids, 4 or more amino acids, 5 or more amino acids, 6 or more amino acids, 8 or more amino acids, 10 or more amino acids, 15 or more amino acids, or 20 or more amino acids, up to 10% of the total number of amino acids, up to 20% of the total number of amino acids, or up to 30% of the total number of amino acids of the ERED and/or KRED polypeptides, where the associated functional activity and/or improved properties of the engineered ERED and/or KRED described herein are maintained. In some embodiments, the deletions can comprise 1-2, 1-3, 1-4, 1-5, 1-6, 1-7, 1-8, 1-9, 1-10, 1-15, 1-20, 1-21, 1-22, 1-23, 1-24, 1-25, 1-30, 1-35, 1-40, 1-45, or 1-50 amino acid residues. In some embodiments, the number of deletions can be 1, 2, 3, 4, 5, 6, 7, 8, 9, 10, 11, 12, 13, 14, 15, 16, 17, 18, 19, 20, 21, 22, 23, 24, 25, 30, 30, 35, 40, 45, or 50 amino acid residues. In some embodiments, the deletions can comprise deletions of 1, 2, 3, 4, 5, 6, 7, 8, 9, 10, 11, 12, 13, 14, 15, 16, 18, 20, 21, 22, 23, 24, or 25 amino acid residues.

[0170] In some embodiments, the engineered ERED and/or KRED polypeptide described herein can have an amino acid sequence comprising an insertion as compared to any one of the engineered ERED and/or KRED polypeptides described herein, such as the exemplary engineered polypeptides of the even-numbered sequences in the range of SEQ ID NOs: 12-430 and 434-524. Thus, for each and every embodiment of the ERED and/or KRED polypeptides of the disclosure, the insertions can comprise one or more amino acids, 2 or more amino acids, 3 or more amino acids, 4 or more amino acids, 5 or more amino acids, 6 or more amino acids, 8 or more amino acids, 10 or more amino acids, 15 or more amino acids, 20 or more amino acids, 30 or more amino acids, 40 or more amino acids, or 50 or more amino acids, where the associated functional activity and/or improved properties of the engineered ERED and/or KRED described herein is maintained. The insertions can be to amino or carboxy terminus, or internal portions of the t ERED and/or KRED polypeptide.

[0171] In some embodiments, the engineered ERED and/or KRED herein can have an amino acid sequence comprising a sequence selected from the even-numbered sequences in the range of SEQ ID NOs: 12-430 and 434-524, and optionally one or several (e.g., up to 3, 4, 5, or up to 10) amino acid residue deletions, insertions and/or substitutions. In some embodiments, the amino acid sequence has optionally 1-2, 1-3, 1-4, 1-5, 1-6, 1-7, 1-8, 1-9, 1-10, 1-15, 1-20, 1-21, 1-22, 1-23, 1-24, 1-25, 1-30, 1-35, 1-40, 1-45, or 1-50 amino acid residue deletions, insertions and/or substitutions. In some embodiments, the amino acid sequence has optionally 1, 2, 3, 4, 5, 6, 7, 8, 9, 10, 11, 12, 13, 14, 15, 16, 17, 18, 19, 20, 21, 22, 23, 24, 25, 30, 30, 35, 40, 45, or 50 amino acid residue deletions, insertions and/or substitutions. In some embodiments, the amino acid sequence has optionally 1, 2, 3, 4, 5, 6, 7, 8, 9, 10, 11, 12, 13, 14, 15, 16, 18, 20, 21, 22, 23, 24, or 25 amino acid residue deletions, insertions and/or substitutions. In some embodiments, the substitutions can be conservative or non-conservative substitutions.

[0172] In the above embodiments, the suitable reaction conditions for the engineered polypeptides are provided as described in the Examples herein.

[0173] In some embodiments, the polypeptides of the present invention are fusion polypeptides in which the engineered polypeptides are fused to other polypeptides, such as, by way of example and not limitation, antibody tags (e.g., myc epitope), purification sequences (e.g., His tags for binding to metals), and cell localization signals (e.g., secretion signals). Thus, the engineered polypeptides described herein can be used with or without fusions to other polypeptides.

[0174] It is to be understood that the polypeptides described herein are not restricted to the genetically encoded amino acids. In addition to the genetically encoded amino acids, the polypeptides described herein may be comprised, either in whole or in part, of naturally occurring and/or synthetic non-encoded amino acids. Certain commonly encountered non-encoded amino acids of which the polypeptides described herein may be comprised include, but are not limited to: the D-stereomers of the genetically-encoded amino acids; 2,3-diaminopropionic acid (Dpr); α-aminoisobutyric acid (Aib); ε-aminohexanoic acid (Aha); δ-aminovaleric acid (Ava); N-methylglycine or sarcosine (MeGly or Sar); ornithine (Orn); citrulline (Cit); t-butylalanine (Bua); t-butylglycine (Bug); N-methylisoleucine (MeIle); phenylglycine (Phg); cyclohexylalanine (Cha); norleucine (Nle); naphthylalanine (Nal); 2-chlorophenylalanine (Ocf); 3-chlorophenylalanine (Mcf); 4-chlorophenylalanine (Pcf); 2-fluorophenylalanine (Off); 3-fluorophenylalanine (Mff); 4-fluorophenylalanine (Pff); 2-bromophenylalanine (Obf); 3-bromophenylalanine (Mbf); 4-bromophenylalanine (Pbf); 2-methylphenylalanine (Omf); 3-methylphenylalanine (Mmf); 4-methylphenylalanine (Pmf); 2-nitrophenylalanine (Onf); 3-nitrophenylalanine (Mnf); 4-nitrophenylalanine (Pnf); 2-cyanophenylalanine (Ocf); 3-cyanophenylalanine (Mcf); 4-cyanophenylalanine (Pcf); 2-trifluoromethylphenylalanine (Otf); 3-trifluoromethylphenylalanine (Mtf); 4-trifluoromethylphenylalanine (Ptf); 4-aminophenylalanine (Paf); 4-iodophenylalanine (Pif); 4-aminomethylphenylalanine (Pamf); 2,4-dichlorophenylalanine (Opef); 3,4-dichlorophenylalanine (Mpcf); 2,4-difluorophenylalanine (Opff); 3,4-difluorophenylalanine (Mpff); pyrid-2-ylalanine (2pAla); pyrid-3-ylalanine (3pAla); pyrid-4-ylalanine (4pAla); naphth-1-ylalanine (1nAla); naphth-2-ylalanine (2nAla); thiazolylalanine (taAla); benzothienylalanine (bAla); thienylalanine (tAla); furylalanine (fAla); homophenylalanine (hPhe); homotyrosine (hTyr); homotryptophan (hTrp); pentafluorophenylalanine (5ff); styrylkalanine (sAla); authrylalanine (aAla); 3,3-diphenylalanine (Dfa); 3-amino-5-phenypentanoic acid (Afp); penicillamine (Pen); 1,2,3,4-tetrahydroisoquinoline-3-carboxylic acid (Tic); β-2-thienylalanine (Thi); methionine sulfoxide (Mso); N(w)-nitroarginine (nArg); homolysine (hLys); phosphonomethylphenylalanine (pmPhe); phosphoserine (pSer); phosphothreonine (pThr); homoaspartic acid (hAsp); homoglutanic acid (hGlu); 1-aminocyclopent-(2 or 3)-ene-4 carboxylic acid; pipecolic acid (PA), azetidine-3-carboxylic acid (ACA); 1-aminocyclopentane-3-carboxylic acid; allylglycine (aGly); propargylglycine (pgGly); homoalanine (hAla); norvaline (nVal); homoleucine (hLeu), homovaline (hVal); homoisoleucine (hIle); homoarginine (hArg); N-acetyl lysine (AcLys); 2,4-diaminobutyric acid (Dbu); 2,3-diaminobutyric acid (Dab); N-methylvaline (MeVal); homocysteine (hCys); homoserine (hSer); hydroxyproline (Hyp) and homoproline (hPro). Additional non-encoded amino acids of which the polypeptides described herein may be comprised will be apparent to those of skill in the art (See e.g., the various amino acids provided in Fasman, CRC Practical Handbook of Biochemistry and Molecular Biology, CRC Press, Boca Raton, Fla., pp. 3-70 [1989], and the references cited therein, all of which are incorporated by reference). These amino acids may be in either the L- or D-configuration.

[0175] Those of skill in the art will recognize that amino acids or residues bearing side chain protecting groups may also comprise the polypeptides described herein. Non-limiting examples of such protected amino acids, which in this case belong to the aromatic category, include (protecting groups listed in parentheses), but are not limited to: Arg(tos), Cys(methylbenzyl), Cys (nitropyridinesulfenyl), Glu(δ-benzylester), Gln(xanthyl), Asn(N-δ-xanthyl), His(bom), His(benzyl), His(tos), Lys(fmoc), Lys(tos), Ser(O-benzyl), Thr (O-benzyl) and Tyr(O-benzyl).

[0176] Non-encoding amino acids that are conformationally constrained of which the polypeptides described herein may be composed include, but are not limited to, N-methyl amino acids (L-configuration); 1-aminocyclopent-(2 or 3)-ene-4-carboxylic acid; pipecolic acid; azetidine carboxylic acid; homoproline (hPro); and 1-aminocyclopentane-3-carboxylic acid.

[0177] In some embodiments, the engineered polypeptides can be in various forms, for example, such as an isolated preparation, as a substantially purified enzyme, whole cells transformed with gene(s) encoding the enzyme, and/or as cell extracts and/or lysates of such cells. The enzymes can be lyophilized, spray-dried, precipitated or be in the form of a crude paste, as further discussed below.

[0178] In some embodiments, the engineered polypeptides can be in the form of a biocatalytic composition. In some embodiments, the biocatalytic composition comprises (a) a means for conversion of a ketone compound to a chiral alcohol via an acid intermediate by contact with an ERED polypeptide and a KRED polypeptide and (b) a suitable cofactor. In some embodiments, the biocatalytic composition comprises an ERED having activity on a enone substrate. In some embodiments, the biocatalytic composition comprises a KRED having activity on a ketone. In some further embodiments, the biocatalytic composition comprises an ERED and a KRED that catalyze a multistep reaction pathway in a single pot. In some embodiments, the biocatalytic composition comprises a NADPH cofactor.

[0179] In some embodiments, additional reaction components or additional techniques are utilized to supplement the reaction conditions. In some embodiments, these include taking measures to stabilize or prevent inactivation of the enzyme, reduce product inhibition, shift reaction equilibrium to desired product formation.

[0180] In some further embodiments, any of the above described process for the conversion of substrate compound to product compound can further comprise one or more steps selected from: extraction, isolation, purification, crystallization, filtration, and/or lyophilization of product compound(s). Methods, techniques, and protocols for extracting, isolating, purifying, and/or crystallizing the product(s) from biocatalytic reaction mixtures produced by the processes provided herein are known to the ordinary artisan and/or accessed through routine experimentation. Additionally, illustrative methods are provided in the Examples below.

### Engineered ERED and KRED Polynucleotides Encoding Engineered Polypeptides, Expression Vectors and Host Cells

[0181] The present invention provides polynucleotides encoding the engineered enzyme polypeptides described herein. In some embodiments, the polynucleotides are operatively linked to one or more heterologous regulatory sequences that control gene expression to create a recombinant polynucleotide capable of expressing the polypeptide. In some embodiments, expression constructs containing at least one heterologous polynucleotide encoding the engineered enzyme polypeptide(s) is introduced into appropriate host cells to express the corresponding enzyme polypeptide(s).

[0182] As will be apparent to the skilled artisan, availability of a protein sequence and the knowledge of the codons corresponding to the various amino acids provide a description of all the polynucleotides capable of encoding the subject polypeptides. The degeneracy of the genetic code, where the same amino acids are encoded by alternative or synonymous codons, allows an extremely large number of nucleic acids to be made, all of which encode an engineered enzyme (e.g., ERED or KRED) polypeptide. Thus, the present invention provides methods and compositions for the production of each and every possible variation of enzyme polynucleotides that could be made that encode the enzyme polypeptides described herein by selecting combinations based on the possible codon choices, and all such variations are to be considered specifically disclosed for any polypeptide described herein, including the amino acid sequences presented in the Examples (e.g., in the various Tables).

[0183] In some embodiments, the codons are preferably optimized for utilization by the chosen host cell for protein production. For example, preferred codons used in bacteria are typically used for expression in bacteria. Consequently, codon optimized polynucleotides encoding the engineered enzyme polypeptides contain preferred codons at about 40%, 50%, 60%, 70%, 80%, 90%, or greater than 90% of the codon positions in the full length coding region.

[0184] In some embodiments, the enzyme polynucleotide encodes an engineered polypeptide having enzyme activity with the properties disclosed herein, wherein the polypeptide comprises an amino acid sequence having at least 60%, 65%, 70%, 75%, 80%, 85%, 86%, 87%, 88%, 89%, 90%, 91%, 92%, 93%, 94%, 95%, 96%, 97%, 98%, 99% or more identity to a reference sequence selected from the SEQ ID NOs provided herein, or the amino acid sequence of any variant (e.g., those provided in the Examples), and one or more residue differences as compared to the reference polynucleotide(s), or the amino acid sequence of any variant as disclosed in the Examples (for example 1, 2, 3, 4, 5, 6, 7, 8, 9, 10 or more amino acid residue positions). In some embodiments, the reference polypeptide sequence is selected from SEQ ID NOs: 10, 20, 162, 262, 282, 294, 322, 346, 432, and/or 476.

[0185] In some embodiments, the polynucleotides are capable of hybridizing under highly stringent conditions to a reference polynucleotide sequence selected from any polynucleotide sequence provided herein, or a complement thereof, or a polynucleotide sequence encoding any of the variant enzyme polypeptides provided herein. In some embodiments, the polynucleotide capable of hybridizing under highly stringent conditions encodes an enzyme polypeptide comprising an amino acid sequence that has one or more residue differences as compared to a reference sequence.

[0186] In some embodiments, an isolated polynucleotide encoding any of the engineered enzyme polypeptides herein is manipulated in a variety of ways to facilitate expression of the enzyme polypeptide. In some embodiments, the polynucleotides encoding the enzyme polypeptides comprise expression vectors where one or more control sequences is present to regulate the expression of the enzyme polynucleotides and/or polypeptides. Manipulation of the isolated polynucleotide prior to its insertion into a vector may be desirable or necessary depending on the expression vector utilized. Techniques for modifying polynucleotides and nucleic acid sequences utilizing recombinant DNA methods are well known in the art. In some embodiments, the control sequences include among others, promoters, leader sequences, polyadenylation sequences, propeptide sequences, signal peptide sequences, and transcription terminators. In some embodiments, suitable promoters are selected based on the host cells selection. For bacterial host cells, suitable promoters for directing transcription of the nucleic acid constructs of the present disclosure, include, but are not limited to promoters obtained from the E. coli lac operon, Streptomyces coelicolor agarase gene (dagA), Bacillus subtilis levansucrase gene (sacB), Bacillus licheniformis alpha-amylase gene (amyL), Bacillus stearothermophilus maltogenic amylase gene (amyM), Bacillus amyloliquefaciens alpha-amylase gene (amyQ), Bacillus licheniformis penicillinase gene (penP), Bacillus subtilis xylA and xylB genes, and prokaryotic beta-lactamase gene (See e.g., Villa-Kamaroff et al., Proc. Natl Acad. Sci. USA 75: 3727-3731 [1978]), as well as the tac promoter (See e.g., DeBoer et al., Proc. Natl Acad. Sci. USA 80: 21-25 [1983]). Exemplary promoters for filamentous fungal host cells, include, but are not limited to promoters obtained from the genes for Aspergillus oryzae TAKA amylase, Rhizomucor miehei aspartic proteinase, Aspergillus niger neutral alpha-amylase, Aspergillus niger acid stable alpha-amylase, Aspergillus niger or Aspergillus awamori glucoamylase (glaA), Rhizomucor miehei lipase, Aspergillus oryzae alkaline protease, Aspergillus oryzae triose phosphate isomerase, Aspergillus nidulans acetamidase, and Fusarium oxysporum trypsin-like protease (See e.g., WO 96/00787), as well as the NA2-tpi promoter (a hybrid of the promoters from the genes for Aspergillus niger neutral alpha-amylase and Aspergillus oryzae triose phosphate isomerase), and mutant, truncated, and hybrid promoters thereof. Exemplary yeast cell promoters can be from the genes can be from the genes for Saccharomyces cerevisiae enolase (ENO-1), Saccharomyces cerevisiae galactokinase (GAL1), Saccharomyces cerevisiae alcohol dehydrogenase/glyceraldehyde-3-phosphate dehydrogenase (ADH2/GAP), and Saccharomyces cerevisiae 3-phosphoglycerate kinase. Other useful promoters for yeast host cells are known in the art (See e.g., Romanos et al., Yeast 8:423-488 [1992]).

[0187] In some embodiments, the control sequence is also a suitable transcription terminator sequence (i.e., a sequence recognized by a host cell to terminate transcription). In some embodiments, the terminator sequence is operably linked to the 3′ terminus of the nucleic acid sequence encoding the enzyme polypeptide. Any suitable terminator which is functional in the host cell of choice finds use in the present invention. Exemplary transcription terminators for filamentous fungal host cells can be obtained from the genes for Aspergillus oryzae TAKA amylase, Aspergillus niger glucoamylase, Aspergillus nidulans anthranilate synthase, Aspergillus niger alpha-glucosidase, and Fusarium oxysporum trypsin-like protease. Exemplary terminators for yeast host cells can be obtained from the genes for Saccharomyces cerevisiae enolase, Saccharomyces cerevisiae cytochrome C (CYC1), and Saccharomyces cerevisiae glyceraldehyde-3-phosphate dehydrogenase. Other useful terminators for yeast host cells are known in the art (See e.g., Romanos et al., supra).

[0188] In some embodiments, the control sequence is also a suitable leader sequence (i.e., a non-translated region of an mRNA that is important for translation by the host cell). In some embodiments, the leader sequence is operably linked to the 5′ terminus of the nucleic acid sequence encoding the enzyme polypeptide. Any suitable leader sequence that is functional in the host cell of choice finds use in the present invention. Exemplary leaders for filamentous fungal host cells are obtained from the genes for Aspergillus oryzae TAKA amylase, and Aspergillus nidulans triose phosphate isomerase. Suitable leaders for yeast host cells are obtained from the genes for Saccharomyces cerevisiae enolase (ENO-1), Saccharomyces cerevisiae 3-phosphoglycerate kinase, Saccharomyces cerevisiae alpha-factor, and Saccharomyces cerevisiae alcohol dehydrogenase/glyceraldehyde-3-phosphate dehydrogenase (ADH2/GAP).

[0189] In some embodiments, the control sequence is also a polyadenylation sequence (i.e., a sequence operably linked to the 3′ terminus of the nucleic acid sequence and which, when transcribed, is recognized by the host cell as a signal to add polyadenosine residues to transcribed mRNA). Any suitable polyadenylation sequence which is functional in the host cell of choice finds use in the present invention. Exemplary polyadenylation sequences for filamentous fungal host cells include, but are not limited to the genes for Aspergillus oryzae TAKA amylase, Aspergillus niger glucoamylase, Aspergillus nidulans anthranilate synthase, Fusarium oxysporum trypsin-like protease, and Aspergillus niger alpha-glucosidase. Useful polyadenylation sequences for yeast host cells are known (See e.g., Guo and Sherman, Mol. Cell. Bio., 15:5983-5990 [1995]).

[0190] In some embodiments, the control sequence is also a signal peptide (i.e., a coding region that codes for an amino acid sequence linked to the amino terminus of a polypeptide and directs the encoded polypeptide into the cell's secretory pathway). In some embodiments, the 5′ end of the coding sequence of the nucleic acid sequence inherently contains a signal peptide coding region naturally linked in translation reading frame with the segment of the coding region that encodes the secreted polypeptide. Alternatively, in some embodiments, the 5′ end of the coding sequence contains a signal peptide coding region that is foreign to the coding sequence. Any suitable signal peptide coding region which directs the expressed polypeptide into the secretory pathway of a host cell of choice finds use for expression of the engineered polypeptide(s). Effective signal peptide coding regions for bacterial host cells are the signal peptide coding regions include, but are not limited to those obtained from the genes for Bacillus NClB 11837 maltogenic amylase, Bacillus stearothermophilus alpha-amylase, Bacillus licheniformis subtilisin, Bacillus licheniformis beta-lactamase, Bacillus stearothermophilus neutral proteases (nprT, nprS, nprM), and Bacillus subtilis prsA. Further signal peptides are known in the art (See e.g., Simonen and Palva, Microbiol. Rev., 57:109-137 [1993]). In some embodiments, effective signal peptide coding regions for filamentous fungal host cells include, but are not limited to the signal peptide coding regions obtained from the genes for Aspergillus oryzae TAKA amylase, Aspergillus niger neutral amylase, Aspergillus niger glucoamylase, Rhizomucor miehei aspartic proteinase, Humicola insolens cellulase, and Humicola lanuginosa lipase. Useful signal peptides for yeast host cells include, but are not limited to those from the genes for Saccharomyces cerevisiae alpha-factor and Saccharomyces cerevisiae invertase.

[0191] In some embodiments, the control sequence is also a propeptide coding region that codes for an amino acid sequence positioned at the amino terminus of a polypeptide. The resultant polypeptide is referred to as a “proenzyme,” “propolypeptide,” or “zymogen.” A propolypeptide can be converted to a mature active polypeptide by catalytic or autocatalytic cleavage of the propeptide from the propolypeptide. The propeptide coding region may be obtained from any suitable source, including, but not limited to the genes for Bacillus subtilis alkaline protease (aprE), Bacillus subtilis neutral protease (nprT), Saccharomyces cerevisiae alpha-factor, Rhizomucor miehei aspartic proteinase, and Myceliophthora thermophila lactase (See e.g., WO 95/33836). Where both signal peptide and propeptide regions are present at the amino terminus of a polypeptide, the propeptide region is positioned next to the amino terminus of a polypeptide and the signal peptide region is positioned next to the amino terminus of the propeptide region.

[0192] In some embodiments, regulatory sequences are also utilized. These sequences facilitate the regulation of the expression of the polypeptide relative to the growth of the host cell. Examples of regulatory systems are those that cause the expression of the gene to be turned on or off in response to a chemical or physical stimulus, including the presence of a regulatory compound. In prokaryotic host cells, suitable regulatory sequences include, but are not limited to the lac, tac, and trp operator systems. In yeast host cells, suitable regulatory systems include, but are not limited to the ADH2 system or GAL1 system. In filamentous fungi, suitable regulatory sequences include, but are not limited to the TAKA alpha-amylase promoter, Aspergillus niger glucoamylase promoter, and Aspergillus oryzae glucoamylase promoter.

[0193] In another aspect, the present invention is directed to a recombinant expression vector comprising a polynucleotide encoding an engineered enzyme polypeptide, and one or more expression regulating regions such as a promoter and a terminator, a replication origin, etc., depending on the type of hosts into which they are to be introduced. In some embodiments, the various nucleic acid and control sequences described herein are joined together to produce recombinant expression vectors which include one or more convenient restriction sites to allow for insertion or substitution of the nucleic acid sequence encoding the enzyme polypeptide at such sites. Alternatively, in some embodiments, the nucleic acid sequence of the present invention is expressed by inserting the nucleic acid sequence or a nucleic acid construct comprising the sequence into an appropriate vector for expression. In some embodiments involving the creation of the expression vector, the coding sequence is located in the vector so that the coding sequence is operably linked with the appropriate control sequences for expression.

[0194] The recombinant expression vector may be any suitable vector (e.g., a plasmid or virus), that can be conveniently subjected to recombinant DNA procedures and bring about the expression of the enzyme polynucleotide sequence. The choice of the vector typically depends on the compatibility of the vector with the host cell into which the vector is to be introduced. The vectors may be linear or closed circular plasmids.

[0195] In some embodiments, the expression vector is an autonomously replicating vector (i.e., a vector that exists as an extra-chromosomal entity, the replication of which is independent of chromosomal replication, such as a plasmid, an extra-chromosomal element, a minichromosome, or an artificial chromosome). The vector may contain any means for assuring self-replication. In some alternative embodiments, the vector is one in which, when introduced into the host cell, it is integrated into the genome and replicated together with the chromosome(s) into which it has been integrated. Furthermore, in some embodiments, a single vector or plasmid, or two or more vectors or plasmids which together contain the total DNA to be introduced into the genome of the host cell, and/or a transposon is utilized.

[0196] In some embodiments, the expression vector contains one or more selectable markers, which permit easy selection of transformed cells. A “selectable marker” is a gene, the product of which provides for biocide or viral resistance, resistance to heavy metals, prototrophy to auxotrophs, and the like. Examples of bacterial selectable markers include, but are not limited to the dal genes from Bacillus subtilis or Bacillus licheniformis, or markers, which confer antibiotic resistance such as ampicillin, kanamycin, chloramphenicol or tetracycline resistance. Suitable markers for yeast host cells include, but are not limited to ADE2, HIS3, LEU2, LYS2, MET3, TRP1, and URA3. Selectable markers for use in filamentous fungal host cells include, but are not limited to, amdS (acetamidase; e.g., from A. nidulans or A. orzyae), argB (ornithine carbamoyltransferases), bar (phosphinothricin acetyltransferase; e.g., from S. hygroscopicus), hph (hygromycin phosphotransferase), niaD (nitrate reductase), pyrG (orotidine-5′-phosphate decarboxylase; e.g., from A. nidulans or A. orzyae), sC (sulfate adenyltransferase), and trpC (anthranilate synthase), as well as equivalents thereof.

[0197] In another aspect, the present invention provides a host cell comprising at least one polynucleotide encoding at least one engineered enzyme polypeptide of the present invention, the polynucleotide(s) being operatively linked to one or more control sequences for expression of the engineered enzyme enzyme(s) in the host cell. Host cells suitable for use in expressing the polypeptides encoded by the expression vectors of the present invention are well known in the art and include but are not limited to, bacterial cells, such as E. coli, Vibrio fluvialis, Streptomyces and Salmonella typhimurium cells; fungal cells, such as yeast cells (e.g., Saccharomyces cerevisiae or Pichia pastoris (ATCC Accession No. 201178)); insect cells such as Drosophila S2 and Spodoptera Sf9 cells; animal cells such as CHO, COS, BHK, 293, and Bowes melanoma cells; and plant cells. Exemplary host cells also include various Escherichia coli strains (e.g., W3110 (AfhuA) and BL21). Examples of bacterial selectable markers include, but are not limited to the dal genes from Bacillus subtilis or Bacillus licheniformis, or markers, which confer antibiotic resistance such as ampicillin, kanamycin, chloramphenicol, and or tetracycline resistance.

[0198] In some embodiments, the expression vectors of the present invention contain an element(s) that permits integration of the vector into the host cell's genome or autonomous replication of the vector in the cell independent of the genome. In some embodiments involving integration into the host cell genome, the vectors rely on the nucleic acid sequence encoding the polypeptide or any other element of the vector for integration of the vector into the genome by homologous or nonhomologous recombination.

[0199] In some alternative embodiments, the expression vectors contain additional nucleic acid sequences for directing integration by homologous recombination into the genome of the host cell. The additional nucleic acid sequences enable the vector to be integrated into the host cell genome at a precise location(s) in the chromosome(s). To increase the likelihood of integration at a precise location, the integrational elements preferably contain a sufficient number of nucleotides, such as 100 to 10,000 base pairs, preferably 400 to 10,000 base pairs, and most preferably 800 to 10,000 base pairs, which are highly homologous with the corresponding target sequence to enhance the probability of homologous recombination. The integrational elements may be any sequence that is homologous with the target sequence in the genome of the host cell. Furthermore, the integrational elements may be non-encoding or encoding nucleic acid sequences. On the other hand, the vector may be integrated into the genome of the host cell by non-homologous recombination.

[0200] For autonomous replication, the vector may further comprise an origin of replication enabling the vector to replicate autonomously in the host cell in question. Examples of bacterial origins of replication are P15A ori or the origins of replication of plasmids pBR322, pUC19, pACYC177 (which plasmid has the P15A ori), or pACYC184 permitting replication in E. coli, and pUB110, pE194, or pTA1060 permitting replication in Bacillus. Examples of origins of replication for use in a yeast host cell are the 2 micron origin of replication, ARS1, ARS4, the combination of ARS1 and CEN3, and the combination of ARS4 and CEN6. The origin of replication may be one having a mutation which makes it's functioning temperature-sensitive in the host cell (See e.g., Ehrlich, Proc. Natl. Acad. Sci. USA 75:1433 [1978]).

[0201] In some embodiments, more than one copy of a nucleic acid sequence of the present invention is inserted into the host cell to increase production of the gene product. An increase in the copy number of the nucleic acid sequence can be obtained by integrating at least one additional copy of the sequence into the host cell genome or by including an amplifiable selectable marker gene with the nucleic acid sequence where cells containing amplified copies of the selectable marker gene, and thereby additional copies of the nucleic acid sequence, can be selected for by cultivating the cells in the presence of the appropriate selectable agent.

[0202] Many of the expression vectors for use in the present invention are commercially available. Suitable commercial expression vectors include, but are not limited to the p3×FLAG™ expression vectors (Sigma-Aldrich Chemicals), which include a CMV promoter and hGH polyadenylation site for expression in mammalian host cells and a pBR322 origin of replication and ampicillin resistance markers for amplification in E. coli. Other suitable expression vectors include, but are not limited to pBluescriptII SK(-) and pBK-CMV (Stratagene), and plasmids derived from pBR322 (Gibco BRL), pUC (Gibco BRL), pREP4, pCEP4 (Invitrogen) or pPoly (See e.g., Lathe et al., Gene 57:193-201 [1987]).

[0203] Thus, in some embodiments, a vector comprising a sequence encoding at least one variant ERED or KRED is transformed into a host cell in order to allow propagation of the vector and expression of the variant KRED(s) or ERED(s). In some embodiments, the variant EREDs or KREDs are post-translationally modified to remove the signal peptide and in some cases may be cleaved after secretion. In some embodiments, the transformed host cell described above is cultured in a suitable nutrient medium under conditions permitting the expression of the variant ERED(s) or KRED(s). Any suitable medium useful for culturing the host cells finds use in the present invention, including, but not limited to minimal or complex media containing appropriate supplements. In some embodiments, host cells are grown in HTP media. Suitable media are available from various commercial suppliers or may be prepared according to published recipes (e.g., in catalogues of the American Type Culture Collection).

[0204] In another aspect, the present invention provides host cells comprising a polynucleotide encoding an improved ERED or KRED polypeptide provided herein, the polynucleotide being operatively linked to one or more control sequences for expression of the ERED or KRED enzyme in the host cell. Host cells for use in expressing the ERED or KRED polypeptides encoded by the expression vectors of the present invention are well known in the art and include but are not limited to, bacterial cells, such as E. coli, Bacillus megaterium, Lactobacillus kefir, Streptomyces and Salmonella typhimurium cells; fungal cells, such as yeast cells (e.g., Saccharomyces cerevisiae or Pichia pastoris (ATCC Accession No. 201178)); insect cells such as Drosophila S2 and Spodoptera Sf9 cells; animal cells such as CHO, COS, BHK, 293, and Bowes melanoma cells; and plant cells. Appropriate culture media and growth conditions for the above-described host cells are well known in the art.

[0205] Polynucleotides for expression of the ERED or KRED may be introduced into cells by various methods known in the art. Techniques include among others, electroporation, biolistic particle bombardment, liposome mediated transfection, calcium chloride transfection, and protoplast fusion. Various methods for introducing polynucleotides into cells are known to those skilled in the art.

[0206] In some embodiments, the host cell is a eukaryotic cell. Suitable eukaryotic host cells include, but are not limited to, fungal cells, algal cells, insect cells, and plant cells. Suitable fungal host cells include, but are not limited to, Ascomycota, Basidiomycota, Deuteromycota, Zygomycota, Fungi imperfecti. In some embodiments, the fungal host cells are yeast cells and filamentous fungal cells. The filamentous fungal host cells of the present invention include all filamentous forms of the subdivision Eumycotina and Oomycota. Filamentous fungi are characterized by a vegetative mycelium with a cell wall composed of chitin, cellulose and other complex polysaccharides. The filamentous fungal host cells of the present invention are morphologically distinct from yeast.

[0207] In some embodiments of the present invention, the filamentous fungal host cells are of any suitable genus and species, including, but not limited to Achlya, Acremonium, Aspergillus, Aureobasidium, Bjerkandera, Ceriporiopsis, Cephalosporium, Chrysosporium, Cochliobolus, Corynascus, Cryphonectria, Cryptococcus, Coprinus, Coriolus, Diplodia, Endothis, Fusarium, Gibberella, Gliocladium, Humicola, Hypocrea, Myceliophthora, Mucor, Neurospora, Penicillium, Podospora, Phlebia, Piromyces, Pyricularia, Rhizomucor, Rhizopus, Schizophyllum, Scytalidium, Sporotrichum, Talaromyces, Thermoascus, Thielavia, Trametes, Tolypocladium, Trichoderma, Verticillium, and/or Volvariella, and/or teleomorphs, or anamorphs, and synonyms, basionyms, or taxonomic equivalents thereof.

[0208] In some embodiments of the present invention, the host cell is a yeast cell, including but not limited to cells of Candida, Hansenula, Saccharomyces, Schizosaccharomyces, Pichia, Kluyveromyces, or Yarrowia species. In some embodiments of the present invention, the yeast cell is Hansenula polymorpha, Saccharomyces cerevisiae, Saccharomyces carlsbergensis, Saccharomyces diastaticus, Saccharomyces norbensis, Saccharomyces kluyveri, Schizosaccharomyces pombe, Pichia pastoris, Pichia finlandica, Pichia trehalophila, Pichia kodamae, Pichia membranaefaciens, Pichia opuntiae, Pichia thermotolerans, Pichia salictaria, Pichia quercuum, Pichia pijperi, Pichia stipitis, Pichia methanolica, Pichia angusta, Kluyveromyces lactis, Candida albicans, or Yarrowia lipolytica.

[0209] In some embodiments of the invention, the host cell is an algal cell such as Chlamydomonas (e.g., C. reinhardtii) and Phormidium (P. sp. ATCC29409).

[0210] In some other embodiments, the host cell is a prokaryotic cell. Suitable prokaryotic cells include, but are not limited to Gram-positive, Gram-negative and Gram-variable bacterial cells. Any suitable bacterial organism finds use in the present invention, including but not limited to Agrobacterium, Alicyclobacillus, Anabaena, Anacystis, Acinetobacter, Acidothermus, Arthrobacter, Azobacter, Bacillus, Bifidobacterium, Brevibacterium, Butyrivibrio, Buchnera, Campestris, Camplyobacter, Clostridium, Corynebacterium, Chromatium, Coprococcus, Escherichia, Enterococcus, Enterobacter, Erwinia, Fusobacterium, Faecalibacterium, Francisella, Flavobacterium, Geobacillus, Haemophilus, Helicobacter, Klebsiella, Lactobacillus, Lactococcus, Ilyobacter, Micrococcus, Microbacterium, Mesorhizobium, Methylobacterium, Methylobacterium, Mycobacterium, Neisseria, Pantoea, Pseudomonas, Prochlorococcus, Rhodobacter, Rhodopseudomonas, Rhodopseudomonas, Roseburia, Rhodospirillum, Rhodococcus, Scenedesmus, Streptomyces, Streptococcus, Synecoccus, Saccharomonospora, Staphylococcus, Serratia, Salmonella, Shigella, Thermoanaerobacterium, Tropheryma, Tularensis, Temecula, Thermosynechococcus, Thermococcus, Ureaplasma, Xanthomonas, Xylella, Yersinia and Zymomonas. In some embodiments, the host cell is a species of Agrobacterium, Acinetobacter, Azobacter, Bacillus, Bifidobacterium, Buchnera, Geobacillus, Campylobacter, Clostridium, Corynebacterium, Escherichia, Enterococcus, Erwinia, Flavobacterium, Lactobacillus, Lactococcus, Pantoea, Pseudomonas, Staphylococcus, Salmonella, Streptococcus, Streptomyces, or Zymomonas. In some embodiments, the bacterial host strain is non-pathogenic to humans. In some embodiments the bacterial host strain is an industrial strain. Numerous bacterial industrial strains are known and suitable in the present invention. In some embodiments of the present invention, the bacterial host cell is an Agrobacterium species (e.g., A. radiobacter, A. rhizogenes, and A. rubi). In some embodiments of the present invention, the bacterial host cell is an Arthrobacter species (e.g., A. aurescens, A. citreus, A. globiformis, A. hydrocarboglutamicus, A. mysorens, A. nicotianae, A. paraffineus, A. protophonniae, A. roseoparqffinus, A. sulfureus, and A. ureafaciens). In some embodiments of the present invention, the bacterial host cell is a Bacillus species (e.g., B. thuringensis, B. anthracis, B. megaterium, B. subtilis, B. lentus, B. circulans, B. pumilus, B. lautus, B. coagulans, B. brevis, B. firmus, B. alkaophius, B. licheniformis, B. clausii, B. stearothermophilus, B. halodurans, and B. amyloliquefaciens). In some embodiments, the host cell is an industrial Bacillus strain including but not limited to B. subtilis, B. pumilus, B. licheniformis, B. megaterium, B. clausii, B. stearothermophilus, or B. amyloliquefaciens. In some embodiments, the Bacillus host cells are B. subtilis, B. licheniformis, B. megaterium, B. stearothermophilus, and/or B. amyloliquefaciens. In some embodiments, the bacterial host cell is a Clostridium species (e.g., C. acetobutylicum, C. tetani E88, C. lituseburense, C. saccharobutylicum, C. perfringens, and C. beijerinckii). In some embodiments, the bacterial host cell is a Corynebacterium species (e.g., C. glutamicum and C. acetoacidophilum). In some embodiments the bacterial host cell is an Escherichia species (e.g., E. coli). In some embodiments, the host cell is Escherichia coli W3110. In some embodiments, the bacterial host cell is an Erwinia species (e.g., E. uredovora, E. carotovora, E. ananas, E. herbicola, E. punctata, and E. terreus). In some embodiments, the bacterial host cell is a Pantoea species (e.g., P. citrea, and P. agglomerans). In some embodiments the bacterial host cell is a Pseudomonas species (e.g., P. putida, P. aeruginosa, P. mevalonii, and P. sp. D-01 10). In some embodiments, the bacterial host cell is a Streptococcus species (e.g., S. equisimiles, S. pyogenes, and S. uberis). In some embodiments, the bacterial host cell is a Streptomyces species (e.g., S. ambofaciens, S. achromogenes, S. avermitilis, S. coelicolor, S. aureofaciens, S. aureus, S. fungicidicus, S. griseus, and S. lividans). In some embodiments, the bacterial host cell is a Zymomonas species (e.g., Z. mobilis, and Z. lipolytica).

[0211] Many prokaryotic and eukaryotic strains that find use in the present invention are readily available to the public from a number of culture collections such as American Type Culture Collection (ATCC), Deutsche Sammlung von Mikroorganismen and Zellkulturen GmbH (DSM), Centraalbureau Voor Schimmelcultures (CBS), and Agricultural Research Service Patent Culture Collection, Northern Regional Research Center (NRRL).

[0212] In some embodiments, host cells are genetically modified to have characteristics that improve protein secretion, protein stability and/or other properties desirable for expression and/or secretion of a protein. Genetic modification can be achieved by genetic engineering techniques and/or classical microbiological techniques (e.g., chemical or UV mutagenesis and subsequent selection). Indeed, in some embodiments, combinations of recombinant modification and classical selection techniques are used to produce the host cells. Using recombinant technology, nucleic acid molecules can be introduced, deleted, inhibited or modified, in a manner that results in increased yields of ERED(s) or KRED(s) within the host cell and/or in the culture medium. For example, knockout of Alp1 function results in a cell that is protease deficient, and knockout of pyr5 function results in a cell with a pyrimidine deficient phenotype. In one genetic engineering approach, homologous recombination is used to induce targeted gene modifications by specifically targeting a gene in vivo to suppress expression of the encoded protein. In alternative approaches, siRNA, antisense and/or ribozyme technology find use in inhibiting gene expression. A variety of methods are known in the art for reducing expression of protein in cells, including, but not limited to deletion of all or part of the gene encoding the protein and site-specific mutagenesis to disrupt expression or activity of the gene product. (See e.g., Chaveroche et al., Nucl. Acids Res., 28:22 e97 [2000]; Cho et al., Molec. Plant Microbe Interact., 19:7-15 [2006]; Maruyama and Kitamoto, Biotechnol Lett., 30:1811-1817 [2008]; Takahashi et al., Mol. Gen. Genom., 272: 344-352 [2004]; and You et al., Arch. Microbiol., 191:615-622 [2009], all of which are incorporated by reference herein). Random mutagenesis, followed by screening for desired mutations also finds use (See e.g., Combier et al., FEMS Microbiol. Lett., 220:141-8 [2003]; and Firon et al., Eukary. Cell 2:247-55 [2003], both of which are incorporated by reference).

[0213] Introduction of a vector or DNA construct into a host cell can be accomplished using any suitable method known in the art, including but not limited to calcium phosphate transfection, DEAE-dextran mediated transfection, PEG-mediated transformation, electroporation, or other common techniques known in the art. In some embodiments, the Escherichia coli expression vector pCK100900i (See, U.S. Pat. No. 9,714,437, which is hereby incorporated by reference) finds use.

[0214] In some embodiments, the engineered host cells (i.e., “recombinant host cells”) of the present invention are cultured in conventional nutrient media modified as appropriate for activating promoters, selecting transformants, or amplifying the ERED or KRED polynucleotide. Culture conditions, such as temperature, pH and the like, are those previously used with the host cell selected for expression, and are well-known to those skilled in the art. As noted, many standard references and texts are available for the culture and production of many cells, including cells of bacterial, plant, animal (especially mammalian) and archebacterial origin.

[0215] In some embodiments, cells expressing the variant ERED or KRED polypeptides of the invention are grown under batch or continuous fermentations conditions. Classical “batch fermentation” is a closed system, wherein the compositions of the medium is set at the beginning of the fermentation and is not subject to artificial alternations during the fermentation. A variation of the batch system is a “fed-batch fermentation” which also finds use in the present invention. In this variation, the substrate is added in increments as the fermentation progresses. Fed-batch systems are useful when catabolite repression is likely to inhibit the metabolism of the cells and where it is desirable to have limited amounts of substrate in the medium. Batch and fed-batch fermentations are common and well known in the art. “Continuous fermentation” is an open system where a defined fermentation medium is added continuously to a bioreactor and an equal amount of conditioned medium is removed simultaneously for processing. Continuous fermentation generally maintains the cultures at a constant high density where cells are primarily in log phase growth. Continuous fermentation systems strive to maintain steady state growth conditions. Methods for modulating nutrients and growth factors for continuous fermentation processes as well as techniques for maximizing the rate of product formation are well known in the art of industrial microbiology.

[0216] In some embodiments of the present invention, cell-free transcription/translation systems find use in producing variant ERED(s) or KRED (s). Several systems are commercially available and the methods are well-known to those skilled in the art.

[0217] The present invention provides methods of making variant ERED and KRED polypeptides or biologically active fragments thereof. In some embodiments, the method comprises: providing a host cell transformed with a polynucleotide encoding an amino acid sequence that comprises at least about 70% (or at least about 75%, at least about 80%, at least about 85%, at least about 90%, at least about 95%, at least about 96%, at least about 97%, at least about 98%, or at least about 99%) sequence identity to SEQ ID NOs: 10, 20, 162, 262, 282, 294, 322, 346, 432, and/or 476, and comprising at least one mutation as provided herein; culturing the transformed host cell in a culture medium under conditions in which the host cell expresses the encoded variant ERED and/or KRED polypeptide; and optionally recovering or isolating the expressed variant ERED and/or KRED polypeptide, and/or recovering or isolating the culture medium containing the expressed variant ERED and/or KRED polypeptide. In some embodiments, the methods further provide optionally lysing the transformed host cells after expressing the encoded ERED and/or KRED polypeptide and optionally recovering and/or isolating the expressed variant ERED or KRED polypeptide from the cell lysate. The present invention further provides methods of making a variant ERED and/or KRED polypeptide comprising cultivating a host cell transformed with a variant ERED and/or KRED polypeptide under conditions suitable for the production of the variant ERED and/or KRED polypeptide and recovering the variant ERED and/or KRED polypeptide. Typically, recovery or isolation of the ERED and/or KRED polypeptide is from the host cell culture medium, the host cell or both, using protein recovery techniques that are well known in the art, including those described herein. In some embodiments, host cells are harvested by centrifugation, disrupted by physical or chemical means, and the resulting crude extract retained for further purification. Microbial cells employed in expression of proteins can be disrupted by any convenient method, including, but not limited to freeze-thaw cycling, sonication, mechanical disruption, and/or use of cell lysing agents, as well as many other suitable methods well known to those skilled in the art.

[0218] Engineered ERED and/or KRED enzymes expressed in a host cell can be recovered from the cells and/or the culture medium using any one or more of the techniques known in the art for protein purification, including, among others, lysozyme treatment, sonication, filtration, salting-out, ultra-centrifugation, and chromatography. Suitable solutions for lysing and the high efficiency extraction of proteins from bacteria, such as E. coli, are commercially available under the trade name CelLytic B™ (Sigma-Aldrich). Thus, in some embodiments, the resulting polypeptide is recovered/isolated and optionally purified by any of a number of methods known in the art. For example, in some embodiments, the polypeptide is isolated from the nutrient medium by conventional procedures including, but not limited to, centrifugation, filtration, extraction, spray-drying, evaporation, chromatography (e.g., ion exchange, affinity, hydrophobic interaction, chromatofocusing, and size exclusion), or precipitation. In some embodiments, protein refolding steps are used, as desired, in completing the configuration of the mature protein. In addition, in some embodiments, high performance liquid chromatography (HPLC) is employed in the final purification steps. For example, in some embodiments, methods known in the art, find use in the present invention (See e.g., Parry et al., Biochem. J., 353:117 [2001]; and Hong et al., Appl. Microbiol. Biotechnol., 73:1331 [2007], both of which are incorporated herein by reference). Indeed, any suitable purification methods known in the art find use in the present invention.

[0219] Chromatographic techniques for isolation of the ERED and/or KRED polypeptide include, but are not limited to reverse phase chromatography high performance liquid chromatography, ion exchange chromatography, gel electrophoresis, and affinity chromatography. Conditions for purifying a particular enzyme will depend, in part, on factors such as net charge, hydrophobicity, hydrophilicity, molecular weight, molecular shape, etc., are known to those skilled in the art.

[0220] In some embodiments, affinity techniques find use in isolating the improved ERED and/or KRED enzymes. For affinity chromatography purification, any antibody which specifically binds the ERED and/or KRED polypeptide may be used. For the production of antibodies, various host animals, including but not limited to rabbits, mice, rats, etc., may be immunized by injection with the ERED and/or KRED. The ERED and/or KRED polypeptide may be attached to a suitable carrier, such as BSA, by means of a side chain functional group or linkers attached to a side chain functional group. Various adjuvants may be used to increase the immunological response, depending on the host species, including but not limited to Freund's (complete and incomplete), mineral gels such as aluminum hydroxide, surface active substances such as lysolecithin, pluronic polyols, polyanions, peptides, oil emulsions, keyhole limpet hemocyanin, dinitrophenol, and potentially useful human adjuvants such as BCG (Bacillus Calmette Guerin) and Corynebacterium parvum.

[0221] In some embodiments, the ERED and/or KRED variants are prepared and used in the form of cells expressing the enzymes, as crude extracts, or as isolated or purified preparations. In some embodiments, the ERED and/or KRED variants are prepared as lyophilisates, in powder form (e.g., acetone powders), or prepared as enzyme solutions. In some embodiments, the ERED and/or KRED variants are in the form of substantially pure preparations.

[0222] In some embodiments, the ERED and/or KRED polypeptides are attached to any suitable solid substrate. Solid substrates include but are not limited to a solid phase, surface, and/or membrane. Solid supports include, but are not limited to organic polymers such as polystyrene, polyethylene, polypropylene, polyfluoroethylene, polyethyleneoxy, and polyacrylamide, as well as co-polymers and grafts thereof. A solid support can also be inorganic, such as glass, silica, controlled pore glass (CPG), reverse phase silica or metal, such as gold or platinum. The configuration of the substrate can be in the form of beads, spheres, particles, granules, a gel, a membrane or a surface. Surfaces can be planar, substantially planar, or non-planar. Solid supports can be porous or non-porous, and can have swelling or non-swelling characteristics. A solid support can be configured in the form of a well, depression, or other container, vessel, feature, or location. A plurality of supports can be configured on an array at various locations, addressable for robotic delivery of reagents, or by detection methods and/or instruments.

[0223] In some embodiments, immunological methods are used to purify ERED and/or KRED variants. In one approach, antibody raised against a wild-type or variant ERED and/or KRED polypeptide (e.g., against a polypeptide comprising any of SEQ ID NOs: 10, 20, 162, 262, 282, 294, 322, 346, 432, and/or 476, and/or a variant thereof, and/or an immunogenic fragment thereof) using conventional methods is immobilized on beads, mixed with cell culture media under conditions in which the variant ERED and/or KRED is bound, and precipitated. In a related approach, immunochromatography finds use.

[0224] In some embodiments, the variant EREDs and/or KREDs are expressed as a fusion protein including a non-enzyme portion. In some embodiments, the variant ERED and/or KRED sequence(s) is fused to a purification facilitating domain. As used herein, the term “purification facilitating domain” refers to a domain that mediates purification of the polypeptide to which it is fused. Suitable purification domains include, but are not limited to metal chelating peptides, histidine-tryptophan modules that allow purification on immobilized metals, a sequence which binds glutathione (e.g., GST), a hemagglutinin (HA) tag (corresponding to an epitope derived from the influenza hemagglutinin protein; See e.g., Wilson et al., Cell 37:767 [1984]), maltose binding protein sequences, the FLAG epitope utilized in the FLAGS extension/affinity purification system (e.g., the system available from Immunex Corp), and the like. One expression vector contemplated for use in the compositions and methods described herein provides for expression of a fusion protein comprising a polypeptide of the invention fused to a polyhistidine region separated by an enterokinase cleavage site. The histidine residues facilitate purification on IMIAC (immobilized metal ion affinity chromatography; See e.g., Porath et al., Prot. Exp. Purif., 3:263-281) [1992]) while the enterokinase cleavage site provides a means for separating the variant ERED or KRED polypeptide from the fusion protein. pGEX vectors (Promega) may also be used to express foreign polypeptides as fusion proteins with glutathione 5-transferase (GST). In general, such fusion proteins are soluble and can easily be purified from lysed cells by adsorption to ligand-agarose beads (e.g., glutathione-agarose in the case of GST-fusions) followed by elution in the presence of free ligand.

[0225] Accordingly, in another aspect, the present invention provides methods of producing the engineered enzyme polypeptides, where the methods comprise culturing a host cell capable of expressing a polynucleotide encoding the engineered enzyme polypeptide under conditions suitable for expression of the polypeptide. In some embodiments, the methods further comprise the steps of isolating and/or purifying the enzyme polypeptides, as described herein.

[0226] Appropriate culture media and growth conditions for host cells are well known in the art. It is contemplated that any suitable method for introducing polynucleotides for expression of the enzyme polypeptides into cells will find use in the present invention. Suitable techniques include, but are not limited to electroporation, biolistic particle bombardment, liposome mediated transfection, calcium chloride transfection, and protoplast fusion.

### Methods of Using the ERED and KRED Enzymes

[0227] In some embodiments, ERED and KRED enzymes described herein find use in processes for conversion of one or more suitable substrates to a product.

[0228] In another aspect, the engineered ERED or KRED polypeptides disclosed herein can be used in a process for the conversion of the substrate compound (1), or structural analogs thereof, to the intermediate of compound (2), or structural analogs thereof, to the product of compound (3) or the corresponding structural analog.

[0229] In the embodiments provided herein and illustrated in the Examples, various ranges of suitable reaction conditions that can be used in the processes, include but are not limited to, substrate loading, co-substrate loading, pH, temperature, buffer, solvent system, polypeptide loading, and reaction time. Further suitable reaction conditions for carrying out the process for biocatalytic conversion of substrate compounds to product compounds using an engineered ERED or KRED described herein can be readily optimized in view of the guidance provided herein by routine experimentation that includes, but is not limited to, contacting the engineered ERED or KRED polypeptide and one or more substrate compounds under experimental reaction conditions of concentration, pH, temperature, and solvent conditions, and detecting the product compound.

[0230] The substrate compound(s) in the reaction mixtures can be varied, taking into consideration, for example, the desired amount of product compound, the effect of each substrate concentration on enzyme activity, stability of enzyme under reaction conditions, and the percent conversion of each substrate to product. In some embodiments, the suitable reaction conditions comprise a substrate compound loading for each of one of more substrates of at least about 0.5 to about 25 g/L, 1 to about 25 g/L, 5 to about 25 g/L, about 10 to about 25 g/L, or 20 to about 25 g/L. In some embodiments, the suitable reaction conditions comprise a substrate compound loading for each of one of more substrates of at least about 0.5 g/L, at least about 1 g/L, at least about 5 g/L, at least about 10 g/L, at least about 15 g/L, at least about 20 g/L, or at least about 30 g/L, 40 g/L, 50 g/L, or even greater.

[0231] In carrying out the ERED or KRED mediated processes described herein, the engineered polypeptide may be added to the reaction mixture in the form of a purified enzyme, partially purified enzyme, whole cells transformed with gene(s) encoding the enzyme, as cell extracts and/or lysates of such cells, and/or as an enzyme immobilized on a solid support. Whole cells transformed with gene(s) encoding the engineered ERED or KRED enzyme or cell extracts, lysates thereof, and isolated enzymes may be employed in a variety of different forms, including solid (e.g., lyophilized, spray-dried, and the like) or semisolid (e.g., a crude paste). The cell extracts or cell lysates may be partially purified by precipitation (ammonium sulfate, polyethyleneimine, heat treatment or the like, followed by a desalting procedure prior to lyophilization (e.g., ultrafiltration, dialysis, etc.). Any of the enzyme preparations (including whole cell preparations) may be stabilized by crosslinking using known crosslinking agents, such as, for example, glutaraldehyde or immobilization to a solid phase (e.g., Eupergit C, and the like).

[0232] The gene(s) encoding the engineered ERED or KRED polypeptides can be transformed into host cell separately or together into the same host cell. For example, in some embodiments one set of host cells can be transformed with gene(s) encoding one engineered ERED or KRED polypeptide and another set can be transformed with gene(s) encoding another ERED or KRED polypeptide. Both sets of transformed cells can be utilized together in the reaction mixture in the form of whole cells, or in the form of lysates or extracts derived therefrom. In other embodiments, a host cell can be transformed with gene(s) encoding multiple engineered ERED or KRED polypeptides. In some embodiments the engineered polypeptides can be expressed in the form of secreted polypeptides and the culture medium containing the secreted polypeptides can be used for the ERED or KRED reaction.

[0233] In some embodiments, the improved activity and/or regioselectivity and/or stereoselectivity of the engineered ERED or KRED polypeptides disclosed herein provides for processes wherein higher percentage conversion can be achieved with lower concentrations of the engineered polypeptide. In some embodiments of the process, the suitable reaction conditions comprise an engineered polypeptide amount of about 1% (w/w), 2% (w/w), 5% (w/w), 10% (w/w), 20% (w/w), 30% (w/w), 40% (w/w), 50% (w/w), 75% (w/w), 100% (w/w) or more of substrate compound loading.

[0234] In some embodiments, the engineered polypeptide is present at about 0.01 g/L to about 50 g/L; about 0.05 g/L to about 50 g/L; about 0.1 g/L to about 40 g/L; about 1 g/L to about 40 g/L; about 2 g/L to about 40 g/L; about 5 g/L to about 40 g/L; about 5 g/L to about 30 g/L; about 0.1 g/L to about 10 g/L; about 0.5 g/L to about 10 g/L; about 1 g/L to about 10 g/L; about 0.1 g/L to about 5 g/L; about 0.5 g/L to about 5 g/L; or about 0.1 g/L to about 2 g/L. In some embodiments, the ERED or KRED polypeptide is present at about 0.01 g/L, 0.05 g/L, 0.1 g/L, 0.2 g/L, 0.5 g/L, 1, 2 g/L, 5 g/L, 10 g/L, 15 g/L, 20 g/L, 25 g/L, 30 g/L, 35 g/L, 40 g/L, or 50 g/L.

[0235] During the course of the reaction, the pH of the reaction mixture may change. The pH of the reaction mixture may be maintained at a desired pH or within a desired pH range. This may be done by the addition of an acid or a base, before and/or during the course of the reaction. Alternatively, the pH may be controlled by using a buffer. Accordingly, in some embodiments, the reaction condition comprises a buffer. Suitable buffers to maintain desired pH ranges are known in the art and include, by way of example and not limitation, borate, phosphate, 2-(N-morpholino)ethanesulfonic acid (MES), 3-(N-morpholino)propanesulfonic acid (MOPS), acetate, triethanolamine, and 2-amino-2-hydroxymethyl-propane-1,3-diol (Tris), and the like. In some embodiments, the reaction conditions comprise water as a suitable solvent with no buffer present.

[0236] In the embodiments of the process, the reaction conditions comprise a suitable pH. The desired pH or desired pH range can be maintained by use of an acid or base, an appropriate buffer, or a combination of buffering and acid or base addition. The pH of the reaction mixture can be controlled before and/or during the course of the reaction. In some embodiments, the suitable reaction conditions comprise a solution pH from about 4 to about 10, pH from about 5 to about 10, pH from about 5 to about 9, pH from about 6 to about 9, pH from about 6 to about 8. In some embodiments, the reaction conditions comprise a solution pH of about 4, 4.5, 5, 5.5, 6, 6.5, 7, 7.5, 8, 8.5, 9, 9.5, or 10.

[0237] In the embodiments of the processes herein, a suitable temperature is used for the reaction conditions, for example, taking into consideration the increase in reaction rate at higher temperatures, and the activity of the enzyme during the reaction time period. Accordingly, in some embodiments, the suitable reaction conditions comprise a temperature of about 10° C. to about 60° C., about 10° C. to about 55° C., about 15° C. to about 60° C., about 20° C. to about 60° C., about 20° C. to about 55° C., about 25° C. to about 55° C., or about 30° C. to about 50° C. In some embodiments, the suitable reaction conditions comprise a temperature of about 10° C., 15° C., 20° C., 25° C., 30° C., 35° C., 40° C., 45° C., 50° C., 55° C., or 60° C. In some embodiments, the temperature during the enzymatic reaction can be maintained at a specific temperature throughout the course of the reaction. In some embodiments, the temperature during the enzymatic reaction can be adjusted over a temperature profile during the course of the reaction.

[0238] In some embodiments, the processes of the invention are carried out in a solvent. Suitable solvents include water, aqueous buffer solutions, organic solvents, polymeric solvents, and/or co-solvent systems, which generally comprise aqueous solvents, organic solvents and/or polymeric solvents. The aqueous solvent (water or aqueous co-solvent system) may be pH-buffered or unbuffered. In some embodiments, the processes using the engineered ERED or KRED decarboxylase polypeptides can be carried out in an aqueous co-solvent system comprising an organic solvent (e.g., ethanol, isopropanol (IPA), dimethyl sulfoxide (DMSO), dimethylformamide (DMF) ethyl acetate, butyl acetate, 1-octanol, heptane, octane, methyl tert-butyl ether (MTBE), toluene, and the like), ionic or polar solvents (e.g., 1-ethyl-4-methylimidazolium tetrafluoroborate, 1-butyl-3-methylimidazolium tetrafluoroborate, 1-butyl-3-methylimidazolium hexafluorophosphate, glycerol, polyethylene glycol, and the like). In some embodiments, the co-solvent can be a polar solvent, such as a polyol, dimethylsulfoxide (DMSO), or lower alcohol. The non-aqueous co-solvent component of an aqueous co-solvent system may be miscible with the aqueous component, providing a single liquid phase, or may be partly miscible or immiscible with the aqueous component, providing two liquid phases. Exemplary aqueous co-solvent systems can comprise water and one or more co-solvents selected from an organic solvent, polar solvent, and polyol solvent. In general, the co-solvent component of an aqueous co-solvent system is chosen such that it does not adversely inactivate the ERED or KRED decarboxylase enzyme under the reaction conditions. Appropriate co-solvent systems can be readily identified by measuring the enzymatic activity of the specified engineered ERED or KRED decarboxylase enzyme with a defined substrate of interest in the candidate solvent system, utilizing an enzyme activity assay, such as those described herein.

[0239] In some embodiments of the process, the suitable reaction conditions comprise an aqueous co-solvent, where the co-solvent comprises DMSO at about 1% to about 50% (v/v), about 1 to about 40% (v/v), about 2% to about 40% (v/v), about 5% to about 30% (v/v), about 10% to about 30% (v/v), or about 10% to about 20% (v/v). In some embodiments of the process, the suitable reaction conditions can comprise an aqueous co-solvent comprising ethanol at about 1% (v/v), about 5% (v/v), about 10% (v/v), about 15% (v/v), about 20% (v/v), about 25% (v/v), about 30% (v/v), about 35% (v/v), about 40% (v/v), about 45% (v/v), or about 50% (v/v).

[0240] In some embodiments, the reaction conditions comprise a surfactant for stabilizing or enhancing the reaction. Surfactants can comprise non-ionic, cationic, anionic and/or amphiphilic surfactants. Exemplary surfactants, include by way of example and not limitation, nonyl phenoxypolyethoxylethanol (NP40), TRITON™ X-100 polyethylene glycol tert-octylphenyl ether, polyoxyethylene-stearylamine, cetyltrimethylammonium bromide, sodium oleylamidosulfate, polyoxyethylene-sorbitanmonostearate, hexadecyldimethylamine, etc. Any surfactant that may stabilize or enhance the reaction may be employed. The concentration of the surfactant to be employed in the reaction may be generally from 0.1 to 50 mg/ml, particularly from 1 to 20 mg/ml.

[0241] In some embodiments, the reaction conditions include an antifoam agent, which aids in reducing or preventing formation of foam in the reaction solution, such as when the reaction solutions are mixed or sparged. Anti-foam agents include non-polar oils (e.g., minerals, silicones, etc.), polar oils (e.g., fatty acids, alkyl amines, alkyl amides, alkyl sulfates, etc.), and hydrophobic (e.g., treated silica, polypropylene, etc.), some of which also function as surfactants. Exemplary anti-foam agents include, Y-30® (Dow Corning), poly-glycol copolymers, oxy/ethoxylated alcohols, and polydimethylsiloxanes. In some embodiments, the anti-foam can be present at about 0.001% (v/v) to about 5% (v/v), about 0.01% (v/v) to about 5% (v/v), about 0.1% (v/v) to about 5% (v/v), or about 0.1% (v/v) to about 2% (v/v). In some embodiments, the anti-foam agent can be present at about 0.001% (v/v), about 0.01% (v/v), about 0.1% (v/v), about 0.5% (v/v), about 1% (v/v), about 2% (v/v), about 3% (v/v), about 4% (v/v), or about 5% (v/v) or more as desirable to promote the reaction.

[0242] The quantities of reactants used in the ERED or KRED reaction will generally vary depending on the quantities of product desired, and concomitantly the amount of ERED or KRED substrate employed. Those having ordinary skill in the art will readily understand how to vary these quantities to tailor them to the desired level of productivity and scale of production.

[0243] In some embodiments, the order of addition of reactants is not critical. The reactants may be added together at the same time to a solvent (e.g., monophasic solvent, biphasic aqueous co-solvent system, and the like), or alternatively, some of the reactants may be added separately, and some together at different time points. For example, the cofactor, co-substrate and substrate may be added first to the solvent.

[0244] The solid reactants (e.g., enzyme, salts, etc.) may be provided to the reaction in a variety of different forms, including powder (e.g., lyophilized, spray dried, and the like), solution, emulsion, suspension, and the like. The reactants can be readily lyophilized or spray dried using methods and equipment that are known to those having ordinary skill in the art. For example, the protein solution can be frozen at −80° C. in small aliquots, then added to a pre-chilled lyophilization chamber, followed by the application of a vacuum.

[0245] For improved mixing efficiency when an aqueous co-solvent system is used, the ERED or KRED, and co-substrate may be added and mixed into the aqueous phase first. The ERED or KRED substrate may be added and mixed in, followed by the organic phase or the substrate may be dissolved in the organic phase and mixed in. Alternatively, the ERED or KRED may be premixed in the organic phase, prior to addition to the aqueous phase.

[0246] The processes of the present invention are generally allowed to proceed until further conversion of substrate to product does not change significantly with reaction time (e.g., less than 10% of substrate being converted, or less than 5% of substrate being converted). In some embodiments, the reaction is allowed to proceed until there is complete or near complete conversion of substrate to product. Transformation of substrate to product can be monitored using known methods by detecting substrate and/or product, with or without derivatization. Suitable analytical methods include gas chromatography, HPLC, MS, and the like.

[0247] In some embodiments of the process, the suitable reaction conditions comprise a substrate loading for each of one or more substrates of at least about 5 g/L, 10 g/L, 20 g/L, 30 g/L, 40 g/L, 50 g/L or more, and wherein the method results in at least about 50%, 60%, 70%, 80%, 90%, 95% or greater conversion of substrate compound to product compound in about in about 24 h or less, in about 12 h or less, in about 6 h or less, or in about 4 h or less.

[0248] The engineered ERED or KRED polypeptides of the present invention when used in the process under suitable reaction conditions result in an excess of the desired product in at least 30%, 40%, 50%, 60%, or greater enantiomeric excess over undesired product(s).

[0249] In some further embodiments of the processes for converting one or more substrate compounds to product compound using the ERED or KRED polypeptides, the suitable reaction conditions can comprise an initial substrate loading for each of one or more substrates to the reaction solution which is then contacted by the polypeptide. This reaction solution is then further supplemented with additional substrate compound as a continuous or batchwise addition over time at a rate of at least about 1 g/L/h, at least about 2 g/L/h, at least about 4 g/L/h, at least about 6 g/L/h, or higher for each of one or more substrate compounds. Thus, according to these suitable reaction conditions, polypeptide is added to a solution having an initial substrate loading of at least about 1 g/L, 5 g/L, or 10 g/L for each of one or more substrate compounds. This addition of polypeptide is then followed by continuous addition of further substrate to the solution at a rate of about 2 g/L/h, 4 g/L/h, or 6 g/L/h for each of one or more substrate compounds until a much higher final substrate loading of at least about 30 g/L or more for each of one or more substrate compounds, is reached. Accordingly, in some embodiments of the process, the suitable reaction conditions comprise addition of the polypeptide to a solution having an initial substrate loading of at least about 1 g/L, 5 g/L, or 10 g/L followed by addition of further substrate to the solution at a rate of about 2 g/L/h, 4 g/L/h, or 6 g/L/h until a final substrate loading of at least about 30 g/L, or more, is reached for each of one or more substrate compounds. This substrate supplementation reaction condition allows for higher substrate loadings to be achieved while maintaining high rates of conversion of substrate to product of at least about 5%, 25%, 50%, 75%, 90% or greater conversion of substrate for either or both of one or more substrate compounds.

[0250] Any of the processes disclosed herein using the engineered polypeptides for the preparation of compound (3) and/or compound (2) can be carried out under a range of suitable reaction conditions, including but not limited to ranges of ketone substrates, temperature, pH, solvent system, substrate loading, polypeptide loading, cofactor loading, and reaction time. In one example, in some embodiments, the preparation of compound (3) and/or compound (2) can be carried out wherein the suitable reaction conditions comprise: (a) enone substrate compound (1) loading of about 2 g/L to 40 g/L; (b) 1-5 mm MgCl₂ (c) of about 0.1 g/L to 100 g/L of each engineered polypeptide; (d) 0.01M to 1M 70% v/v potassium phosphate buffer with 30% v/v isopropanol; (e) 0.1-2.0 g/L NADPH; (f) pH at 5-8; and (g) temperature of about 20° C. to 60° C. In some embodiments, the suitable reaction conditions comprise: (a) about 5 g/L compound (1) substrate compound); (b) about 2 mM MgCl₂; (c) about 15 g/L of each engineered polypeptide; (d) 70% v/v 140 mm potassium phosphate buffer with 30% v/v isopropanol; (e) 0.5 g/L of NADPH; (f) pH at 6, and (g) about 30° C.

[0251] In some embodiments, additional reaction components or additional techniques carried out to supplement the reaction conditions. These can include taking measures to stabilize or prevent inactivation of the enzyme, reduce product inhibition, shift reaction equilibrium to formation of the desired product.

[0252] In further embodiments, any of the above described process for the conversion of one or more substrate compounds to product compound can further comprise one or more steps selected from: extraction; isolation; purification; and crystallization of product compound. Methods, techniques, and protocols for extracting, isolating, purifying, and/or crystallizing the product from biocatalytic reaction mixtures produced by the above disclosed processes are known to the ordinary artisan and/or accessed through routine experimentation. Additionally, illustrative methods are provided in the Examples below.

[0253] Various features and embodiments of the present invention are illustrated in the following representative examples, which are intended to be illustrative, and not limiting.

### EXPERIMENTAL

[0254] The following Examples, including experiments and results achieved, are provided for illustrative purposes only and are not to be construed as limiting the present invention. Indeed, there are various suitable sources for many of the reagents and equipment described below. It is not intended that the present invention be limited to any particular source for any reagent or equipment item.

[0255] In the experimental disclosure below, the following abbreviations apply: M (molar); mM (millimolar), uM and μM (micromolar); nM (nanomolar); mol (moles); gm and g (gram); mg (milligrams); ug and μg (micrograms); L and l (liter); ml and mL (milliliter); cm (centimeters); mm (millimeters); um and μιη (micrometers); sec. (seconds); min(s) (minute(s)); h(s) and hr(s) (hour(s)); U (units); MW (molecular weight); rpm (rotations per minute); psi and PSI (pounds per square inch); ° C. (degrees Centigrade); RT and rt (room temperature); CV (coefficient of variability); CAM and cam (chloramphenicol); PMBS (polymyxin B sulfate); IPTG (isopropyl β-D-1-thiogalactopyranoside); LB (lysogeny broth); TB (terrific broth); SFP (shake flask powder); CDS (coding sequence); DNA (deoxyribonucleic acid); RNA (ribonucleic acid); nt (nucleotide; polynucleotide); aa (amino acid; polypeptide); E. coli W3110 (commonly used laboratory E. coli strain, available from the Coli Genetic Stock Center [CGSC], New Haven, Conn.); HTP (high throughput); HPLC (high pressure liquid chromatography); HPLC-UV (HPLC-Ultraviolet Visible Detector); 1H NMR (proton nuclear magnetic resonance spectroscopy); FIOPC (fold improvements over positive control); Sigma and Sigma-Aldrich (Sigma-Aldrich, St. Louis, Mo.; Difco (Difco Laboratories, BD Diagnostic Systems, Detroit, Mich.); Microfluidics (Microfluidics, Westwood, Mass.); Life Technologies (Life Technologies, a part of Fisher Scientific, Waltham, Mass.); Amresco (Amresco, LLC, Solon, Ohio); Carbosynth (Carbosynth, Ltd., Berkshire, UK); Varian (Varian Medical Systems, Palo Alto, Calif.); Agilent (Agilent Technologies, Inc., Santa Clara, Calif.); Infors (Infors USA Inc., Annapolis Junction, Md.); and Thermotron (Thermotron, Inc., Holland, Mich.).

### Example 1

### Production of Engineered Polypeptides in pCK110900

[0256] The polynucleotide (SEQ ID NO: 9) encoding the polypeptide having ene reductase activity (SEQ ID NO:10), was cloned into the pCK110900 vector system (See e.g., U.S. Pat. No. 9,714,437, which is hereby incorporated by reference in its entirety) and subsequently expressed in E. coli W3110fhuA under the control of the lac promoter. This polynucleotide, and associated polypeptide, encodes a chimera derived from OYE1, OYEZ and OYE3 (SEQ ID NO: 1, SEQ ID NO: 3, and SEQ ID NO: 5), as described in U.S. Pat. No. 8,329,438.

[0257] The polynucleotide (SEQ ID NO: 7) encoding the polypeptide having ketoreductase activity (SEQ ID NO: 8), was cloned into the pCK110900 vector system (See e.g., U.S. Pat. No. 9,714,437, which is hereby incorporated by reference in its entirety) and subsequently expressed in E. coli W3110fhuA under the control of the lac promoter. This polynucleotide, and associated polypeptide, is a variant derived from the wildtype L. kefir.

[0258] In a 96-well format, single colonies were picked and grown in 190 μL LB media containing 1% glucose and 30 μg/mL CAM at 30° C., 200 rpm, and 85% humidity. Following overnight growth, 20 μL of the grown cultures were transferred into a deep-well plate containing 380 μL of TB media with 30 μg/mL CAM, with 1 mM MgSO₄ for KRED cultures. The cultures were grown at 30° C. at 250 rpm with 85% humidity for approximately 2.5 hours. When the optical density (OD₆₀₀) of the cultures reached 0.4-0.6, expression of the ene reductase or ketoreductase gene was induced by the addition of IPTG to a final concentration of 1 mM. Following induction, growth continued for 18-20 hours at 30° C., 250 rpm, and 85% humidity. Cells were harvested by centrifugation at 4,000 rpm at 4° C. for 10 minutes; the supernatant was then discarded. The cell pellets were stored at −80° C. until ready for use.

[0259] Prior to performing the assay, the cell pellets were thawed and resuspended in 200 μL of lysis buffer containing 1 g/L lysozyme, 0.5 g/L PMBS and 0.025 μL/mL of commercial DNAse (New England BioLabs, M0303L) in 0.1 M potassium phosphate buffer at pH 6.0 or 0.2 M sodium phosphate buffer pH 7.0. The plates were agitated with medium-speed shaking for 2 hours on a microtiter plate shaker at room temperature. The plates were then centrifuged at 4,000 rpm for 10 minutes at 4° C., and the clarified supernatants were used in the HTP assay reaction described in the following examples.

[0260] Shake-flask procedures can be used to generate engineered ene reductase or ketoreductase shake-flask powders (SFP), which are useful for secondary screening assays and/or use in the biocatalytic processes described herein. Shake flask powder preparation of enzymes provides a more purified preparation (e.g., up to 30% of total protein) of the engineered enzyme, as compared to the cell lysate used in HTP assays and also allows for the use of more concentrated enzyme solutions. To start the culture, 10-uL aliquot of a glycerol stock of E. coli containing a plasmid encoding an engineered polypeptide of interest was inoculated into 8 mL of LB cell culture media with 30 μg/mL CAM and 1% glucose. The culture was grown overnight (at least 16 hours) in an incubator at 30° C. with shaking at 250 rpm. The grown culture was then added to 250 mL of TB media with 30 μg/mL CAM in a 1 L shake-flask. The 250-mL culture was grown at 30° C. and 250 rpm for 3.5 hours until OD₆₀₀ reached 0.6-0.8. Expression of the ene reductase or keto reductase gene was induced by the addition of IPTG to a final concentration of 1 mM, and growth was continued for an additional 18-20 hours. Cells were harvested by transferring the culture into a pre-weighed centrifuge bottle which was then centrifuged at 4,000 rpm for 10 minutes at 4° C. The supernatant was discarded, and the remaining cell pellet was weighed. In some embodiments, the cell pellet was stored at −80° C. until ready to use. For lysis, the cell pellet was resuspended in 6 mL/g wet cell weight of 10 mM sodium phosphate or potassium buffer at pH 6.0, or pH 7.0 with 2 mM MgSO₄ added for the KRED lysis, and lysed using a 110L MICROFLUIDIZER® processor system (Microfluidics). Cell debris was removed by centrifugation at 10,000 rpm for 60 minutes at 4° C. The clarified lysate was collected, frozen at −80° C., and then lyophilized, using standard methods known in the art. Lyophilization of frozen clarified lysate provides a dry shake-flask powder comprising crude engineered polypeptide.

### Example 2

### Evolution and Screening of Engineered Polypeptides Derived from SEQ ID NO: 10 for Improved Production of Compound (3)

[0261] The engineered polynucleotide (SEQ ID NO: 9) encoding the polypeptide with ene reductase activity of SEQ ID NO: 10 was used to generate the engineered polypeptides of Table 2.2. These polypeptides displayed improved ene reductase activity under the desired conditions e.g., the improvement in the formation of the alcohol of compound (3) from the substrate enone of compound (1), in a coupled reaction with keto reductase (SEQ ID NO: 8), as compared to the starting polypeptide. The engineered polypeptides, having the amino acid sequences of even-numbered sequence identifiers were generated from the “backbone” amino acid sequence of SEQ ID NO: 10, as described below.

[0262] Directed evolution began with the polynucleotide set forth in SEQ ID NO: 9. Libraries of engineered polypeptides were generated using various well-known techniques (e.g., saturation mutagenesis, recombination of previously identified beneficial amino acid differences) and screened using HTP assay and analysis methods that measured the polypeptides' ability to produce compound (3).

[0263] The enzyme assays were carried out in 96-well, deep-well (2.1 mL total volume) plates, in 100 μL total reaction volume per well. The reactions contained 50 v/v % of undiluted ene reducase lysate, prepared as described in EXAMPLE 1: 5 g/L (1), 0.5 g/L NADPH, 15 g/L KRED (KRED P2-G03, Codexis, Inc.), and dissolved in a mixture of 70% (v/v) 140 mM potassium phosphate buffer at pH 6 with 2 mM magnesium chloride and 30% (v/v) isopropyl alcohol. The reaction plates were heat-sealed and shaken at 600 rpm at 30° C. for 18 hours.

[0264] After overnight incubation (˜18 hours), 300 μL/well of acetonitrile were added to the reaction plates and mixed well. The plates were sealed and centrifuged at 4,000 rpm for 10 min. An aliquot of the supernatant was removed and further diluted 800-fold into water. After dilution, the reactions were analyzed on the Agilent RapidFire 365 high throughput mass spectrometer according the details in Table 2.1, below.

TABLE 2.1
RapidFire SPE-MS/MS Conditions for 3-Hydroxyhexanoid
Acid Detection
Agilent RapidFire Conditions

| Pump1 Buffer | Water LCMS grade; 0.6 mL/min | |
|---|---|---|
| | flow rate | |
| Pump2 Buffer | ACC Juice | |
| | (50% water:25% ACN:25% Acetone) | |
| | LCMS grade + 100 uM ammonium | |
| | acetate; 1.25 mL/min flow rate | |
| Pump3 Buffer | ACC Juice | |
| | (50% water:25% ACN:25% Acetone) | |
| | LCMS grade + l00 uM ammonium | |
| | acetate; 1.25 mL/min flow rate | |
| Aqueous wash | Water | |
| Organic wash | Acetonitrile | |
| SPE cartridge | Graphilic carbon type D | |
| RF state 1 Aspirate | 600 | ms |
| RF state 2 Load/Wash | 1750 | ms |
| RF state 3 Extra Wash | 0 | |
| RF state 4 Elute | 6000 | ms |
| RF state 5 Reequilibrate | 1000 | ms |

Agilent Jet Stream source parameters

| Drying gas temperature | 300° C. | |
|---|---|---|
| Drying gas flow | 9 | L/min |
| Nebulizer pressure | 45 | psi |
| Sheath gas temperature | 300° C. | |
| Sheath gas flow | 12 | L/min |
| Capillary voltage | −2500 | V |
| Nozzle voltage | −2000 | V |

Agilent 6470 Triple Quadrupole MRM parameters

| Compound | Q1 | Q3 | Dwell | Fragmentor | CE | CAV |
|---|---|---|---|---|---|---|
| 3-HydroxyCycloHexenoid- | 143 | 97.1 | 40 | 100 | 14 | 4 |
| Acid (Quant ion) | | | | | | |
| 3-HydroxyCycloHexenoid- | 143 | 95.1 | 40 | 100 | 26 | 4 |
| Acid | | | | | | |
| 3-HydroxyCycloHexenoid- | 143 | 69 | 40 | 100 | 45 | 4 |
| Acid | | | | | | |
| 3-HydroxyCycloHexenoid- | 143 | 79.2 | 40 | 100 | 31 | 4 |
| Acid | | | | | | |
| 3-HydroxyCycloHexenoid- | 143 | 58.9 | 40 | 100 | 27 | 4 |
| Acid | | | | | | |

TABLE 2.2
ERED Activity for the Production of Compound (3) Relative
to SEQ ID NO: 10

| | | Percent Conversion Fold |
|---|---|---|
| SEQ ID NO: | Amino Acid Differences | Improvement Relative |
| (nt/aa) | (Relative to SEQ ID NO: 10) | to SEQ ID NO: 10 |
| 11/12 | E19K/T260P/E363K/D394K | +++ |
| 13/14 | V250T/T309S/T384I | +++ |
| 15/16 | V250T/E290K/T384I | +++ |
| 17/18 | V250T/T384I | +++ |
| 19/20 | A32V/N127T/V250T/T384I | +++ |
| 21/22 | K168A | ++ |
| 23/24 | A183G | + |
| 25/26 | R13G | + |
| 27/28 | L103S | +++ |
| 29/30 | A183E | ++ |
| 31/32 | K399E | ++ |
| 33/34 | N209R | +++ |
| 35/36 | K399V | + |
| 37/38 | K5S | + |
| 39/40 | N398G | + |
| 41/42 | Q109G | ++ |
| 43/44 | L103R/K154G | + |
| 45/46 | K399G | + |
| 47/48 | L103G | ++ |
| 49/50 | K99R | + |
| 51/52 | K5Q | + |
| 53/54 | K369E | + |
| 55/56 | H30Y | + |
| 57/58 | E307G | ++ |
| 59/60 | N100R | + |
| 61/62 | D107E | +++ |
| 63/64 | S306V | + |
| 65/66 | P341G | ++ |
| 67/68 | Y359Q | + |
| 69/70 | K168Q | ++ |
| 71/72 | A183W | + |
| 73/74 | N156G | ++ |
| 75/76 | D92E | + |
| 77/78 | Y359R | ++ |
| 79/80 | D107A | ++ |
| 81/82 | F18L/L103G | ++ |
| 83/84 | K154R | + |
| 85/86 | V56Q | + |
| 87/88 | D394A | + |
| 89/90 | H44Y | ++ |
| 91/92 | K172R | + |
| 93/94 | A279L | + |
| 95/96 | A279Q | + |
| 97/98 | A183F | ++ |
| 99/100 | F124S | +++ |
| 101/102 | Q10L | + |
| 103/104 | K369A | + |
| 105/106 | K168G | + |
| 107/108 | N398E | + |
| 109/110 | E149F | + |
| 111/112 | L103Q | ++ |
| 113/114 | Q169V | + |
| 115/116 | H44F | + |
| 117/118 | L103A | ++ |
| 119/120 | Y359V | + |
| 121/122 | D107R | ++ |
| 123/124 | L103R | +++ |
| 125/126 | L103T | +++ |
| 127/128 | D107N | ++ |
| 129/130 | V56M | + |
| 131/132 | D107Q | ++ |
| 133/134 | V250R | +++ |

Levels of increased activity were determined relative to the reference polypeptide of SEQ ID NO: 10 and defined as follows: “+” .88 to 1.21, “++” > 1.21, “+++” > 1.58

[0265] Selected enzymes were regrown and retested under similar conditions with 2 equivalents of NADPH and without a cofactor recycling system to look for the presence of the undesired enantiomer of the intermediate. These samples were derivatized with TMS-diazomethane and analyzed by GC as their methyl esters according to the method in Table 2.3. >99% e.e. was observed in all samples tested.

TABLE 2.3
GC Parameters
Method for Determining Conversion and Stereoselectivity
of ERED and KRED variants

| | |
|---|---|
| Instrument | Agilent 6890 GC |
| Column | BGB-174, 30 m × 250 μm × 0.25 μm film |
| | thickness (p/n 27430-025) |
| Carrier gas and flow rate | Helium, 2.0 mL/min (constant flow control) |
| Column temperature | 125° C. hold for 0.5 minutes, ramp to |
| | 150° C. at 20° C./min, hold at 150° C. for |
| | 3.9 min, ramp to 200° C. at 55^{o} C./min, |
| | hold at 200° C. for 0.5 minutes |
| Detector and temperature | FID, 250° C. |
| Inlet temperature and | 250° C., 50:1 |
| split ratio | |
| Injection volume | 2 μL |
| Compound retention times | Trans alcohol (both enantiomers): 5.67 min |
| (all retention times are for the | (R)-intermediate: 5.81 min |
| methyl esters following | Cis alcohol (both enantiomers): 5.81 min |
| derivatization with TMS- | (S)-intermediate: 5.89 min |
| diazomethane) | Substrate: 6.18 |
| | Allylic Alcohols |
| | (unknown stereochemistry): 6.67, 6.72 min |

### Example 3

### Evolution and Screening of Engineered Polypeptides Derived from SEQ ID NO: 20 for Improved Production of Compound (3)

[0266] The engineered polynucleotide (SEQ ID NO: 19) encoding the polypeptide with ene reductase activity of SEQ ID NO: 20 was used to generate the engineered polypeptides of Table 3.1. These polypeptides displayed improved ene reductase activity under the desired conditions e.g., the improvement in the formation of the alcohol of compound (3) from the substrate enone of compound (1), in a coupled reaction with keto reductase KRED-P2-G03, as compared to the starting polypeptide. The engineered polypeptides, having the amino acid sequences of even-numbered sequence identifiers were generated from the “backbone” amino acid sequence of SEQ ID NO: 20, as described below.

[0267] Directed evolution began with the polynucleotide set forth in SEQ ID NO: 19, Libraries of engineered polypeptides were generated using various well-known techniques (e.g., saturation mutagenesis, recombination of previously identified beneficial amino acid differences) and screened using HTP assay and analysis methods that measured the polypeptides' ability to produce compound (3).

[0268] The enzyme assays were carried out in 96-well, deep-well (2.1 mL total volume) plates, in 100 μL total reaction volume per well. The reactions contained 25 v/v % of undiluted ene reducase lysate, prepared as described in EXAMPLE 1: 5 g/L (1), 0.5 g/L NADPH, 10 g/L KRED-P2-G03, and dissolved in a mixture of 40% (v/v) 250 mM potassium phosphate buffer at pH 6 with 2 mM magnesium chloride and 60% (v/v) isopropyl alcohol. The reaction plates were heat-sealed and shaken at 600 rpm at 30° C. for 18 hours.

[0269] After overnight incubation (˜18 hours), 300 μL/well of acetonitrile were added to the reaction plates and mixed well. The plates were sealed and centrifuged at 4,000 rpm for 10 min. An aliquot of the supernatant was removed and further diluted 400-fold into water. After dilution, the reactions were analyzed on the Agilent RapidFire 365 high throughput mass spectrometer measuring the amount of alcohol compound (3) using the conditions in Table 2.1.

TABLE 3.1
ERED Activity for the Production of Compound (3) Relative to SEQ ID NO: 20

| SEQ | | Percent Conversion Fold |
|---|---|---|
| ID NO: | | Improvement Relative to |
| (nt/aa) | Amino Acid Differences (Relative to SEQ ID NO: 20) | SEQ ID NO: 20 |
| 135/136 | V32A/L103G/Q109G/K154R/K168Q/A183G/P341R/N398E | +++ |
| 137/138 | V32A/A183G/P341R/K399E | + |
| 139/140 | V32A/A183G | + |
| 141/142 | H44Y/L103R/D107E/F124S/T127N/A183E | +++ |
| 143/144 | L103R/D107E/F124S/N209R/D394E | +++ |
| 145/146 | Q148M | + |
| 147/148 | T38S | ++ |
| 149/150 | Q148R | + |
| 151/152 | V114M | + |
| 153/154 | Y83V | +++ |
| 155/156 | Y83M | + |
| 157/158 | M40G | + |
| 159/160 | G261S | + |
| 161/162 | G261C | + |
| 163/164 | Y83F | + |
| 165/166 | V118A | + |
| 167/168 | Q148A | + |
| 169/170 | L103R/D107Q/F124S | +++ |
| 171/172 | F124S/E150M | +++ |
| 173/174 | V32A/H44Y/D107Q/F124S/T127N/E150M/A183E | + |
| 175/176 | V32A/H44Y/L103T/D107Q/F124S/T127N/E150M/T250R | ++ |
| 177/178 | H44Y/L103Q/F124S/T127N/E150M/A183E/T260P | ++ |
| 179/180 | V32A/L103R/D107R/F124S/N209R/T250R | +++ |
| 181/182 | V32A/L103A/D107Q/F124S | + |
| 183/184 | V32A/F124S/T127N/T250R | ++ |
| 185/186 | V32A/D107R/F124S/N209R/D394E | ++ |
| 187/188 | V32A/L103R/D107Q/F124S/T127N/E150M/T250R | + |
| 189/190 | H44Y/L103Q/D107Q/F124S/T127N | ++ |
| 191/192 | V32A/H44Y/L103Q/D107R/F124S/T127N/P341G/D394E | ++ |
| 193/194 | H44Y/L103T/F124S/T250R/D394E | ++ |
| 195/196 | V32A/L103R/D107E/F124S/T250R/D394E | ++ |
| 197/198 | V32A/L103T/D107R/F124S/A183E/T250R | ++ |
| 199/200 | L103R/D107Q/F124S/T250R | + |
| 201/202 | L103R/D107R/F124S/T127N/E150M | + |

Levels of increased activity were determined relative to the reference polypeptide of SEQ ID NO: 20 and defined as follows: “+” 1.06 to 2.37, “++” > 2.37, “+++” > 2.89

[0270] Selected enzymes were regrown and retested under similar conditions with 2 equivalents of NADPH and without a cofactor recycling system to look for the presence of the undesired enantiomer of the intermediate. These samples were derivatized with TMS-diazomethane and analyzed by GC as their methyl esters according to the method in Table 2.3. >99% e.e. was observed in all samples tested.

### Example 4

### Evolution and Screening of Engineered Polypeptides Derived from SEQ ID NO: 162 for Improved Production of Compound (3)

[0271] The engineered polynucleotide (SEQ ID NO: 161) encoding the polypeptide with ene reductase activity of SEQ ID NO: 162 was used to generate the engineered polypeptides of Table 4.1. These polypeptides displayed improved ene reductase activity under the desired conditions e.g., the improvement in the formation of the alcohol of compound (3) from the substrate enone or compound (1), in a coupled reaction with keto reductase KRED-P2-G03, as compared to the starting polypeptide. The engineered polypeptides, having the amino acid sequences of even-numbered sequence identifiers were generated from the “backbone” amino acid sequence of SEQ ID NO: 162, as described below.

[0272] Directed evolution began with the polynucleotide set forth in SEQ ID NO: 161. Libraries of engineered polypeptides were generated using various well-known techniques (e.g., saturation mutagenesis, recombination of previously identified beneficial amino acid differences) and screened using HTP assay and analysis methods that measured the polypeptides' ability to produce compound (3).

[0273] The enzyme assays were carried out in 96-well deep-well (2.1 mL total volume) plates, in 100 μL total reaction volume per well. The reactions contained 25 v/v % of undiluted ene reducase lysate, prepared as described in EXAMPLE 1: 20 g/L (1), 0.5 g/L NADPH, 2 g/L KRED-P2-G03, 2.5 g/L GDH-105, 100 g/L glucose dissolved in 200 mM sodium phosphate buffer at pH 7.2 with 2 mM magnesium chloride. The reaction plates were heat-sealed and shaken at 600 rpm at 45° C. for 18 hours.

[0274] After overnight incubation (˜18 hours), 700 μL/well of acetonitrile were added to the reaction plates and mixed well. The plates were sealed and centrifuged at 4,000 rpm for 20 min. An aliquot of the supernatant was removed and further diluted 400-fold into water. After dilution, the reactions were analyzed on the Agilent RapidFire 365 high throughput mass spectrometer, measuring the amount of alcohol compound (3) using the conditions in Table 2.1.

TABLE 4.1
ERED Activity for the Production of Compound (3) Relative
to SEQ ID NO: 162

| | | Percent Conversion Fold |
|---|---|---|
| SEQ ID NO: | Amino Acid Differences | Improvement Relative |
| (nt/aa) | (Relative to SEQ ID NO: 162) | to SEQ ID NO: 162 |
| 203/204 | L298K | + |
| 205/206 | F7G | + |
| 207/208 | M378T | ++ |
| 209/210 | T127V | + |
| 211/212 | S306P | ++ |
| 213/214 | S161A | + |
| 215/216 | E307G | ++ |
| 217/218 | Q109G | + |
| 219/220 | Y359T | + |
| 221/222 | N100E | + |
| 223/224 | E336G | + |
| 225/226 | V333T | ++ |
| 227/228 | N209R/M378E | ++ |
| 229/230 | V95I | ++ |
| 231/232 | F7G/E307G | ++ |
| 233/234 | E307Q | + |
| 235/236 | N209R | + |
| 237/238 | S297Y | +++ |
| 239/240 | V56Y/M378Q | +++ |
| 241/242 | M378G | +++ |
| 243/244 | A258K | + |
| 245/246 | E302A | + |
| 247/248 | V4S | + |
| 249/250 | V299G | + |
| 251/252 | P341G | +++ |
| 253/254 | Y359E | + |
| 255/256 | A146P/V333A | + |
| 257/258 | M378R | ++ |
| 259/260 | S297F | ++ |
| 261/262 | S297W | +++ |
| 263/264 | M378P | +++ |

Levels of increased activity were determined relative to the reference polypeptide of SEQ ID NO: 162 and defined as follows: “+” 1.20 to 1.36, “++” > 1.36, “+++” > 1.63

[0275] Select variants were retested without KRED-P2-G03 to check the selectivity of the ERED variants. The enzyme assays were carried out in 96-well, deep-well (2.1 mL total volume) plates, in 100 μL total reaction volume per well. The reactions contained 25 v/v % of undiluted ene reducase lysate, prepared as described in EXAMPLE 1: 5 g/L (1), 0.5 g/L NADPH, 2.5 g/L GDH-105, 12.9 g/L glucose dissolved in 200 mM sodium phosphate buffer at pH 7.2 with 2 mM magnesium chloride. The reaction plates were heat-sealed and shaken at 600 rpm at 45° C. for 18 hours.

[0276] After overnight incubation (˜18 hours), a 100-uL aliquot of a mixture of 20% 6 M HCl and 80% isopropyl alcohol, ˜5 mg NaCl and 0.5 mL EtOAc was added to each well. The plates were sealed, shaken for 15 minutes, and centrifuged at 4,000 rpm for 5 min. A 200-uL aliquot of the EtOAc supernatant was removed. 10 uL of 2 M TMS-diazomethane were added to each well to derivatize the samples as their methyl-esters. After 1 hr at RT, the excess TMS-diazomethane was quenched with 4 uL acetic acid. These samples were then analyzed by chiral GC to determine the activity and selectivity of the enzyme variants using the analytical method described in Table 2.3. >99% enantiomeric excess was observed in all variants tested.

### Example 5

### Evolution and Screening of Engineered Polypeptides Derived from SEQ ID NO: 262 for Improved Production of Compound (3)

[0277] The engineered polynucleotide (SEQ ID NO: 261) encoding the polypeptide with ene reductase activity of SEQ ID NO: 262 was used to generate the engineered polypeptides of Table 5.1. These polypeptides displayed improved ene reductase activity under the desired conditions e.g., the improvement in the formation of the alcohol of compound (3) from the substrate enone of compound (1), in a coupled reaction with keto reductase KRED-P2-G03, as compared to the starting polypeptide. The engineered polypeptides, having the amino acid sequences of even-numbered sequence identifiers were generated from the “backbone” amino acid sequence of SEQ ID NO: 262, as described below.

[0278] Directed evolution began with the polynucleotide set forth in SEQ ID NO: 261. Libraries of engineered polypeptides were generated using various well-known techniques (e.g., saturation mutagenesis, recombination of previously identified beneficial amino acid differences) and screened using HTP assay and analysis methods that measured the polypeptides' ability to produce compound (3).

[0279] The enzyme assays were carried out in 96-well, deep-well (2.1 mL total volume) plates, in 100 μL total reaction volume per well. The reactions contained 20 v/v % of undiluted ene reductase lysate, prepared as described in EXAMPLE 1: 25 g/L (1), 0.5 g/L NADPH, 2 g/L KRED-P2-G03, 2.5 g/L GDH-105, 200 g/L glucose dissolved in 200 mM sodium phosphate buffer at pH 7.2 with 2 mM magnesium chloride. The reaction plates were heat-sealed and shaken at 600 rpm at 45° C. for 18 hours.

[0280] After overnight incubation (˜18 hours), 700 μL/well of acetonitrile were added to the reaction plates and mixed well. The plates were sealed and centrifuged at 4,000 rpm for 20 min. An aliquot of the supernatant was removed and further diluted 500-fold into water. After dilution, the reactions were analyzed on the Agilent RapidFire 365 high throughput mass spectrometer, according to the details in Table 2.1.

TABLE 5.1
ERED Activity for the Production of Compound (3) Relative to SEQ ID NO: 262

| SEQ ID NO: | Amino Acid Differences | Percent Conversion Fold Improvement |
|---|---|---|
| (nt/aa) | (Relative to SEQ ID NO: 262) | Relative to SEQ ID NO: 262 |
| 265/266 | V4T/N209R/Y359E/M378P | + |
| 267/268 | N209R/A258K | + |
| 269/270 | V4T/K151R/V333A | ++ |
| 271/272 | V4T/K151R/E307G/M378P | +++ |
| 273/274 | N209R/V333A/Y359T | + |
| 275/276 | N209R | + |
| 277/278 | N100E/N209R/A258K/Y359T | + |
| 279/280 | V4T/K151R/Y359E/M378Q | + |
| 281/282 | V4T/N100E/N209R/A258K/Y359T/M378Q | + |
| 283/284 | A146P/K151R/Y359T/M378P | ++ |
| 285/286 | V4T/N209R/Y359T | + |
| 287/288 | M378P | + |
| 289/290 | N209R/L298K/Y359E/M378P | ++ |
| 291/292 | N100E/A146P/K151R/A258K/Y359E/M378Q | ++ |
| 293/294 | N100K/M378G | + |
| 295/296 | M378E | ++ |
| 297/298 | F7G/V95I/N100K | +++ |
| 299/300 | A258R/M378G | + |
| 301/302 | V95I/A258R/M378G | ++ |
| 303/304 | V95I/N100K/N326G/M378T | + |
| 305/306 | P341G | +++ |
| 307/308 | V95I/N100K/N326G/V333T/M378T | ++ |
| 309/310 | V95I/V333T | +++ |

Levels of increased activity were determined relative to the reference polypeptide of SEQ ID NO: 262 and defined as follows: “+” 1.65 to 2.11, “++” > 2.11 , “+++” > 2.56

[0281] Select variants were retested without KRED-P2-G03 to check the selectivity of the ERED variants. The enzyme assays were carried out in 96-well, deep-well (2.1 mL total volume) plates, in 100 μL total reaction volume per well. The reactions contained 20 v/v % of undiluted ene reductase lysate, prepared as described in EXAMPLE 1: 5 g/L (1), 0.5 g/L NADPH, 2.5 g/L GDH-105, 25 g/L glucose dissolved in 200 mM sodium phosphate buffer at pH 7.2 with 2 mM magnesium chloride. The reaction plates were heat-sealed and shaken at 600 rpm at 45° C. for 18 hours.

[0282] After overnight incubation (˜18 hours), a 100-uL aliquot of a mixture of 20% 6 M HCl and 80% isopropyl alcohol, ˜5 mg NaCl and 0.5 mL EtOAc was added to each well. The plates were sealed, shaken for 15 minutes, and centrifuged at 4,000 rpm for 5 min. A 200-uL aliquot of the EtOAc supernatant was removed. 10 uL of 2 M TMS-diazomethane were added to each well to derivatize the samples as their methyl-esters. After 1 hr at RT, the excess TMS-diazomethane was quenched with 4 uL acetic acid. These samples were then analyzed by chiral GC to determine the activity and selectivity of the enzyme variants using the analytical method described in Table 1-3. >99% enantiomeric excess was observed in all variants tested.

### Example 6

### Evolution and Screening of Engineered Polypeptides Derived from SEQ ID NO: 282 for Improved Production of Compound (3)

[0283] The engineered polynucleotide (SEQ ID NO: 281) encoding the polypeptide with ene reductase activity of SEQ ID NO: 282 was used to generate the engineered polypeptides of Table 6.1. These polypeptides displayed improved ene reductase activity under the desired conditions e.g., the improvement in the formation of the alcohol of compound (3) from the substrate enone of compound (1), in a coupled reaction with keto reductase KRED-P2-G03, as compared to the starting polypeptide. The engineered polypeptides, having the amino acid sequences of even-numbered sequence identifiers were generated from the “backbone” amino acid sequence of SEQ ID NO: 282, as described below.

[0284] Directed evolution began with the polynucleotide set forth in SEQ ID NO: 281. Libraries of engineered polypeptides were generated using various well-known techniques (e.g., saturation mutagenesis, recombination of previously identified beneficial amino acid differences) and screened using HTP assay and analysis methods that measured the polypeptides' ability to produce compound (3).

[0285] The enzyme assays were carried out in 96-well, deep-well (2.1 mL total volume) plates, in 100 μL. total reaction volume per well. The reactions contained 25 v/v % of undiluted ene reducase lysate, prepared as described in EXAMPLE 1: 35 g/L (1), 0.5 g/L NADPH, 2 g/L KRED-P2-G03, 2.5 g/L GDH-105, 200 g/L glucose dissolved in 200 mM sodium phosphate buffer at pH 7.3 with 2 mM magnesium chloride. The reaction plates were heat-sealed and shaken at 600 rpm at 45° C. for 18 hours.

[0286] After overnight incubation (˜18 hours), 700 μL/well of acetonitrile were added to the reaction plates and mixed well. The plates were sealed and centrifuged at 4,000 rpm for 10 min. An aliquot of the supernatant was removed and further diluted 500-fold into water. After dilution, the reactions were analyzed on the Agilent RapidFire 365 high throughput mass spectrometer, measuring the amount of alcohol compound (3) using the conditions in Table 2.1.

TABLE 6.1
ERED Activity for the Production of Compound (3)
Relative to SEQ ID NO: 282

| | | Percent Conversion |
|---|---|---|
| SEQ ID NO: | Amino Acid Differences | Fold Improvement |
| (nt/aa) | (Relative to SEQ ID NO: 282) | Relative to SEQ ID NO: 282 |
| 311/312 | V89I | + |
| 313/314 | L283C | + |
| 315/316 | L243I | + |

Levels of increased activity were determined relative to the reference polypeptide of SEQ ID NO: 282 and defined as follows: “+” from 1.02 to 1.80

[0287] Select variants were retested to check the selectivity of the ERED variants. This test was done in the presence of KRED-P2-G03, looking for the presence of the cis-isomer of the product. The enzyme assays were carried out in 96-well, deep-well (2.1 mL total volume) plates, in 100 μL total reaction volume per well. The reactions contained 5 v/v % of undiluted ene reducase lysate, prepared as described in EXAMPLE 1: 5 g/L (1), 0.5 g/L NADPH, 2 g/L KRED-P2-G03, 2.5 g/L GDH-105, 25 g/L glucose, 200 g/L sodium gluconate, dissolved in 200 mM sodium phosphate buffer at pH 7.2 with 2 mM magnesium chloride. The reaction plates were heat-sealed and shaken at 600 rpm at 45° C. for 18 hours.

[0288] After overnight incubation (˜18 hours), a 100-uL aliquot of a mixture of 20% 6 M HCl and 80% isopropyl alcohol, ˜5 mg NaCl and 0.5 mL EtOAc was added to each well. The plates were sealed, shaken for 15 minutes, and centrifuged at 4,000 rpm for 5 min. A 200-uL aliquot of the EtOAc supernatant was removed. 10 uL of 2 M TMS-diazomethane were added to each well to derivatize the samples as their methyl-esters. After 1 hr at RT, the excess TMS-diazomethane was quenched with 4 uL acetic acid. These samples were then analyzed by chiral GC to determine the activity and selectivity of the enzyme variants using the analytical method described in Table 1-3. >99% enantiomeric excess was observed in all variants tested.

### Example 7

### Evolution and Screening of Engineered Polypeptides Derived from SEQ ID NO: 294 for Improved Production of Compound (3)

[0289] The engineered polynucleotide (SEQ ID NO: 293) encoding the polypeptide with ene reductase activity of SEQ ID NO: 294 was used to generate the engineered polypeptides of Table 7.1. These polypeptides displayed improved ene reductase activity under the desired conditions e.g., the improvement in the formation of the alcohol of compound (3) from the substrate enone of compound (1), in a coupled reaction with keto reductase KRED-P2-G03, as compared to the starting polypeptide. The engineered polypeptides, having the amino acid sequences of even-numbered sequence identifiers were generated from the “backbone” amino acid sequence of SEQ ID NO: 294, as described below.

[0290] Directed evolution began with the polynucleotide set forth in SEQ ID NO: 293. Libraries of engineered polypeptides were generated using various well-known techniques (e.g., saturation mutagenesis, recombination of previously identified beneficial amino acid differences) and screened using HTP assay and analysis methods that measured the polypeptides' ability to produce compound (3).

[0291] The enzyme assays were carried out in 96-well, deep-well (2.1 mL total volume) plates, in 100 μL total reaction volume per well. The reactions contained 5 v/v % of undiluted ene reducase lysate, prepared as described in EXAMPLE 1: 5 g/L (1), 0.5 g/L NADPH, 2 g/L KRED-P2-G03, 2 g/L GDH-105, 100 g/L glucose dissolved in 200 mM sodium phosphate buffer at pH 7.2 with 2 mM magnesium chloride. The reaction plates were heat-sealed and shaken at 600 rpm at 45° C. for 18 hours.

[0292] After overnight incubation (˜18 hours), 700 μL/well of acetonitrile were added to the reaction plates and mixed well. The plates were sealed and centrifuged at 4,000 rpm for 10 min. An aliquot of the supernatant was removed and further diluted 500-fold into water. After dilution, the reactions were analyzed on the Agilent RapidFire 365 high throughput mass spectrometer, measuring the amount of alcohol compound (3) using the conditions in Table 2.1.

TABLE 7.1
ERED Activity for the Production of Compound (3)
Relative to SEQ ID NO: 294

| | | Percent Conversion Fold |
|---|---|---|
| SEQ ID NO: | Amino Acid Differences | Improvement Relative |
| (nt/aa) | (Relative to SEQ ID NO: 294) | to SEQ ID NO: 294 |
| 317/318 | V118C | ++ |
| 319/320 | T377K/G378Q | ++ |
| 321/322 | T374S/G378Q | + |
| 323/324 | V118A | ++ |
| 325/326 | Y314L | + |
| 327/328 | N47H | +++ |
| 329/330 | Q148K | ++ |
| 331/332 | Q148L | + |
| 333/334 | G378Q | + |
| 335/336 | A258K/C261V | + |
| 337/338 | A258K/C261L | +++ |
| 339/340 | A258K/C261M | + |

Levels of increased activity were determined relative to the reference polypeptide of SEQ ID NO: 294 and defined as follows: “+” .91 to 1.07, “++” > 1.07, “+++” > 1.13

[0293] Select variants were retested to check the selectivity of the ERED variants. This test was done in the presence of KRED-P2-G03, looking for the presence of the cis-isomer of the product. The enzyme assays were carried out in 96-well, deep-well (2.1 mL total volume) plates, in 100 μL total reaction volume per well. The reactions contained 5 v/v % of undiluted ene reducase lysate, prepared as described in EXAMPLE 1: 5 g/L (1), 0.5 g/L NADPH, 2 g/L KRED-P2-G03, 2.5 g/L GDH-105, 25 g/L glucose, 200 g/L sodium gluconate, dissolved in 200 mM sodium phosphate buffer at pH 7.2 with 2 mM magnesium chloride. The reaction plates were heat-sealed and shaken at 600 rpm at 45° C. for 18 hours.

[0294] After overnight incubation (˜18 hours), a 100-uL aliquot of a mixture of 20% 6 M HCl and 80% isopropyl alcohol, ˜5 mg NaCl and 0.5 mL EtOAc was added to each well. The plates were sealed, shaken for 15 minutes, and centrifuged at 4,000 rpm for 5 min. A 200-uL aliquot of the EtOAc supernatant was removed. 10 uL of 2 M TMS-diazomethane were added to each well to derivatize the samples as their methyl-esters. After 1 hr at RT, the excess TMS-diazomethane was quenched with 4 uL acetic acid. These samples were then analyzed by chiral GC to determine the activity and selectivity of the enzyme variants using the analytical method described in Table 1.3. >99% enantiomeric excess was observed in all variants tested.

### Example 8

### Evolution and Screening of Engineered Polypeptides Derived from SEQ ID NO: 322 for Improved Production of Compound (3)

[0295] The engineered polynucleotide (SEQ ID NO: 321) encoding the polypeptide with ene reductase activity of SEQ ID NO: 322 was used to generate the engineered polypeptides of Table 8.1. These polypeptides displayed improved ene reductase activity under the desired conditions e.g., the improvement in the formation of the alcohol of compound (3) from the substrate enone of compound (1), in a coupled reaction with keto reductase KRED-P2-G03, as compared to the starting polypeptide. The engineered polypeptides, having the amino acid sequences of even-numbered sequence identifiers were generated from the “backbone” amino acid sequence of SEQ ID NO: 322, as described below.

[0296] Directed evolution began with the polynucleotide set forth in SEQ ID NO: 321. Libraries of engineered polypeptides were generated using various well-known techniques (e.g., saturation mutagenesis, recombination of previously identified beneficial amino acid differences) and screened using HTP assay and analysis methods that measured the polypeptides' ability to produce compound (3).

[0297] The enzyme assays were carried out in 96-well, deep-well (2.1 mL total volume) plates, in 100 μL. total reaction volume per well. The reactions contained 2 v/v % of undiluted ene reducase lysate, prepared as described in EXAMPLE 1: 10 g/L (1), 0.5 g/L NADPH, 2 g/L KRED-P2-G03, 2 g/L GDH-105, 200 g/L glucose dissolved in 200 mM sodium phosphate buffer at pH 7.2 with 2 mM magnesium chloride. The reaction plates were heat-sealed and shaken at 600 rpm at 45° C. for 18 hours.

[0298] After overnight incubation (˜18 hours), 700 μL/well of acetonitrile were added to the reaction plates and mixed well. The plates were sealed and centrifuged at 4,000 rpm for 10 min. An aliquot of the supernatant was removed and further diluted 500-fold into water. After dilution, the reactions were analyzed on the Agilent RapidFire 365 high throughput mass spectrometer, measuring the amount of alcohol compound (3) using the conditions in Table 2.1.

TABLE 8.1
ERED Activity for the Production of Compound (3)
Relative to SEQ ID NO: 322

| | | Percent Conversion |
|---|---|---|
| | | Fold Improvement |
| SEQ ID NO: | Amino Acid Differences | Relative to SEQ ID |
| (nt/aa) | (Relative to SEQ ID NO: 322) | NO: 322 |
| 341/342 | K100N/L243I | ++ |
| 343/344 | K100N/L243I/S374T | ++ |
| 345/346 | N47H/V89I/V95I/Q148L/A258K/C261V | +++ |
| 347/348 | V95I/Q148L/A258K/C261V | ++ |
| 349/350 | V95I/Q148L | +++ |
| 351/352 | V95I/L243I | + |
| 353/354 | N47H/V89I/A258K | + |
| 355/356 | N47H/V95I | + |
| 357/358 | V95I/Q148L/L243I/A258K/C261V | + |
| 359/360 | V89I/V95I/L243I | + |
| 361/362 | V95I/Q148L/L243I/C261V | + |
| 363/364 | Q148L/L243I | ++ |
| 365/366 | N47H/V89I/V95I/L243I/A258K/ | + |
| | C261L/Q378P | |

Levels of increased activity were determined relative to the reference polypeptide of SEQ ID NO: 322 and defined as follows: “+” .82 to 1.33, “++” > 1.33, “+++” > 2.71

[0299] Select variants were retested to check the selectivity of the ERED variants. This test was done in the presence of KRED-P2-G03, looking for the presence of the cis-isomer of the product. The enzyme assays were carried out in 96-well, deep-well (2.1 mL total volume) plates, in 100 μL total reaction volume per well. The reactions contained 5 v/v % of undiluted ene reducase lysate, prepared as described in EXAMPLE 1: 5 g/L (1), 0.5 g/L NADPH, 2 g/L KRED-P2-G03, 2.5 g/L GDH-105, 25 g/L glucose, 200 g/L sodium gluconate, dissolved in 200 mM sodium phosphate buffer at pH 7.2 with 2 mM magnesium chloride. The reaction plates were heat-sealed and shaken at 600 rpm at 45° C. for 18 hours.

[0300] After overnight incubation (˜18 hours), a 100-uL aliquot of a mixture of 20% 6 M HCl and 80% isopropyl alcohol, ˜5 mg NaCl and 0.5 mL EtOAc was added to each well. The plates were sealed, shaken for 15 minutes, and centrifuged at 4,000 rpm for 5 min. A 200-uL aliquot of the EtOAc supernatant was removed. 10 uL of 2 M TMS-diazomethane were added to each well to derivatize the samples as their methyl-esters. After 1 hr at RT, the excess TMS-diazomethane was quenched with 4 uL acetic acid. These samples were then analyzed by chiral GC to determine the activity and selectivity of the enzyme variants using the analytical method described in Table 2.3. >99% enantiomeric excess was observed in all variants tested.

### Example 9

### Evolution and Screening of Engineered Polypeptides Derived from SEQ ID NO: 346 for Improved Production of Compound (3)

[0301] The engineered polynucleotide (SEQ ID NO: 345) encoding the polypeptide with ene reductase activity of SEQ ID NO: 346 was used to generate the engineered polypeptides of Table 9.1. These polypeptides displayed improved ene reductase activity under the desired conditions e.g., the improvement in the formation of the alcohol of compound (3) from the substrate enone of compound (1), in a coupled reaction with keto reductase KRED-P2-G03, as compared to the starting polypeptide. The engineered polypeptides, having the amino acid sequences of even-numbered sequence identifiers were generated from the “backbone” amino acid sequence of SEQ ID NO: 346 as described below.

[0302] Directed evolution began with the polynucleotide set forth in SEQ ID NO: 345. Libraries of engineered polypeptides were generated using various well-known techniques (e.g., saturation mutagenesis, recombination of previously identified beneficial amino acid differences) and screened using HTP assay and analysis methods that measured the polypeptides' ability to produce compound (3).

[0303] The enzyme assays were carried out in 96-well, deep-well (2.1 mL total volume) plates, in 100 μL. total reaction volume per well. The reactions contained 40 v/v % of fold-fold diluted ene reducase lysate, prepared as described in EXAMPLE 1 and then heated to 45° C. for 2 hours, 10 g/L (1), 0.5 g/L NADPH, 0.5 g/L KRED (SEQ ID NO: 476), 0.25 g/L GDH-105, 200 g/L glucose dissolved in 200 mM sodium phosphate buffer at pH 7.2 with 2 mM magnesium chloride. The reaction plates were heat-sealed and shaken at 600 rpm at 45° C. for 18 hours.

[0304] After overnight incubation (˜18 hours), 700 μL/well of acetonitrile were added to the reaction plates and mixed well. The plates were sealed and centrifuged at 4,000 rpm for 10 min. An aliquot of the supernatant was removed and further diluted 500-fold into water. After dilution, the reactions were analyzed on the Agilent RapidFire 365 high throughput mass spectrometer, measuring the amount of alcohol compound (3) with conditions in Table 2.1.

TABLE 9.1
ERED Activity for the Production of Compound (3)
Relative to SEQ ID NO: 346

| | | Percent Conversion Fold |
|---|---|---|
| SEQ ID NO: | Amino Acid Differences | Improvement Relative |
| (nt/aa) | (Relative to SEQ ID NO: 346) | to SEQ ID NO: 346 |
| 367/368 | T388G | +++ |
| 369/370 | V393A | + |
| 371/372 | W397A | ++ |
| 373/374 | C108S | ++ |
| 375/376 | A11V | ++ |
| 377/378 | R13V | +++ |
| 379/380 | A235G | +++ |
| 381/382 | A392G | ++ |
| 383/384 | R64V | ++ |
| 385/386 | P20E | ++ |
| 387/388 | R64N | ++ |
| 389/390 | W397F | ++ |
| 391/392 | V175R | + |
| 393/394 | P320R | + |
| 395/396 | C108L | + |
| 397/398 | K99V | + |
| 399/400 | A29V | + |
| 401/402 | W397C | +++ |
| 403/404 | K99M | + |
| 405/406 | V393E | + |
| 407/408 | R64A | ++ |
| 409/410 | A11G | + |
| 411/412 | T388V | + |
| 413/414 | K99V/N398K | + |
| 415/416 | V333Q | + |
| 417/418 | W397D | ++ |
| 419/420 | R13Q | +++ |
| 421/422 | V393T | + |
| 423/424 | I21L | + |
| 425/426 | Q10R | +++ |
| 427/428 | R64E | + |
| 429/430 | L243M | + |

Levels of increased activity were determined relative to the reference polypeptide of SEQ ID NO: 346 and defined as follows: “+” 2.30 to 2.94, “++” > 2.94, “+++” > 3.39

[0305] Select variants were retested to check the selectivity of the ERED variants. This test was done in the presence of KRED (SEQ ID NO: 476), looking for the presence of the cis-isomer of the product. The enzyme assays were carried out in 96-well, deep-well (2.1 mL total volume) plates, in 100 μL total reaction volume per well. The reactions contained 5 v/v % of undiluted ene reducase lysate, prepared as described in EXAMPLE 1: 5 g/L (1), 0.5 g/L NADPH, 0.5 g/L KRED (SEQ ID NO: 476), 0.25 g/L GDH-105, 25 g/L glucose, 200 g/L sodium gluconate, dissolved in 200 mM sodium phosphate buffer at pH 7.2 with 2 mM magnesium chloride. The reaction plates were heat-sealed and shaken at 600 rpm at 45° C. for 18 hours.

[0306] After overnight incubation (˜18 hours), a 50-uL aliquot of a mixture of 20% 6 M HCl and 80% isopropyl alcohol, ˜5 mg NaCl and 0.5 mL EtOAc was added to each well. The plates were sealed, shaken for 15 minutes, and centrifuged at 4,000 rpm for 5 min. A 200-uL aliquot of the EtOAc supernatant was removed. 10 uL of 2 M TMS-diazomethane were added to each well to derivatize the samples as their methyl-esters. After 1 hr at RT, the excess TMS-diazomethane was quenched with 4 uL acetic acid. These samples were then analyzed by chiral GC to determine the activity and selectivity of the enzyme variants using the analytical method described in Table 6-2. >99% enantiomeric excess was observed in all variants tested.

### Example 10

### Evolution and Screening of Engineered Polypeptides Derived from SEQ ID NO: 432 for Improved Production of Compound (3)

[0307] The engineered polynucleotide (SEQ ID NO: 431) encoding the polypeptide with ketoreductase activity of SEQ ID NO: 432 was used to generate the engineered polypeptides of Table 10.1. These polypeptides displayed improved ketoreductase activity under the desired conditions e.g., the improvement in the formation of the alcohol of compound (3), from the intermediate ketone of compound (2), as compared to the starting polypeptide. The engineered polypeptides, having the amino acid sequences of even-numbered sequence identifiers were generated from the “backbone” amino acid sequence of SEQ ID NO: 432, as described below.

[0308] Directed evolution began with the polynucleotide set forth in SEQ ID NO: 431. Libraries of engineered polypeptides were generated using various well-known techniques (e.g., saturation mutagenesis, recombination of previously identified beneficial amino acid differences) and screened using HTP assay and analysis methods that measured the polypeptides' ability to produce compound (3).

[0309] The enzyme assays were carried out in 96-well, deep-well (2.1 mL total volume) plates, in 100 μL total reaction volume per well. The reactions contained 2 v/v % of undiluted ketoreductase lysate, prepared as described in EXAMPLE 1: 2 g/L (1), 8 g/L (2), 0.5 g/L NADPH, 1 g/L GDH-105, 100 g/L glucose, 100 g/L sodium gluconate, dissolved in 200 mM sodium phosphate buffer at pH 7.2 with 2 mM magnesium chloride. The reaction plates were heat-sealed and shaken at 600 rpm at 40° C. for 18 hours.

[0310] After overnight incubation (˜18 hours), a 50-uL aliquot of a mixture of 20% HCl and 80% isopropyl alcohol, ˜5 mg NaCl and 1 mL EtOAc was added to each well. The plates were sealed, shaken for 15 minutes, and centrifuged at 4,000 rpm for 5 min. A 200-uL aliquot of the EtOAc supernatant was removed for analysis. 10 uL of 2 M TMS-diazomethane were added to each well to derivatize the samples as their methyl-esters. After 1 hr at RT, the excess TMS-diazomethane was quenched with 4 uL acetic acid. These samples were then analyzed by chiral GC to determine the activity and selectivity of the enzyme variants using the analytical method described in Table 1-3.

[0311] The allylic alcohol of compound (4) is a byproduct that is formed if a KRED reacts directly with the substrate compound (1). The first round of the KRED screen (and the second round retest) were done using GC to check for selectivity and to look for this undesired side product.

TABLE 10.1
KRED Activity for the Production of Compound (3) Relative to
SEQ ID NO: 432

| | | Percent |
|---|---|---|
| | | Conversion Fold |
| | | Improvement |
| SEQ ID NO: | Amino Acid Differences | Relative to |
| (nt/aa) | (Relative to SEQ ID NO: 432) | SEQ ID NO: 432 |
| 433/434 | L21K/K72T/T103D/L147I | + |
| 435/436 | L21K/T103D/L147I | + |
| 437/438 | L21K/S65R/T103D/T152K | + |
| 439/440 | L21K/S65R/L147I/T152K | + |
| 441/442 | L21K/K72T/N131Y/V181I/D197R | + |
| 443/444 | L21K | + |
| 445/446 | L21K/K72T/L73V/T103D | + |
| 447/448 | L21K/K72T/T152K/V181I | + |
| 449/450 | L21K/L73V/V181I | ++ |
| 451/452 | L21K/S65R/K72T/L73V/T103D | + |
| 453/454 | L21K/L73V/T103D | ++ |
| 455/456 | L21K/T103D/L147I/T152K | + |
| 457/458 | L21K/K72T/T103D | ++ |
| 459/460 | L21K/L73V/N131Y/L147I | + |
| 461/462 | L21K/L73V/L147I | + |
| 463/464 | L21K/S65R/N131Y/T152K | +++ |
| 465/466 | L21K/S65R/T152K | ++ |
| 467/468 | L21K/S65R/K72T/L147I | +++ |
| 469/470 | L21K/T103D | +++ |
| 471/472 | L21K/S65R/K72T/N131Y/L147/V181I | + |
| 473/474 | L21K/L147I | +++ |
| 475/476 | L21K/K72T/T103D/L147I/T152K/V181I | ++ |
| 477/478 | L21K/K72T/T103D/N131Y/T152K/I226L | ++ |
| 479/480 | T2S/K72D | ++ |
| 481/482 | T2S/K72D/L172V | +++ |
| 483/484 | K26R/D173Y/N221D | ++ |

Levels of increased activity were determined relative to the reference polypeptide of SEQ ID NO: 432 and defined as follows: “+” 1.07 to 1.20, “++” > 1.20, “+++” > 1.25

### Example 11

### Evolution and Screening of Engineered Polypeptides Derived from SEQ ID NO: 476 for Improved Production of Compound (3)

[0312] The engineered polynucleotide (SEQ ID NO: 475) encoding the polypeptide with ketoreductase activity of SED ID NO: 476 was used to generate the engineered polypeptides of Table 11.1. These polypeptides displayed improved ketoreductase activity under the desired conditions e.g., the improvement in the formation of the alcohol of compound (3), from the substrate enone of compound (1), in a coupled reaction with ene reductase (SEQ ID NO: 346), as compared to the starting polypeptide. The engineered polypeptides, having the amino acid sequences of even-numbered sequence identifiers were generated from the “backbone” amino acid sequence of SEQ ID NO: 476, as described below.

[0313] Directed evolution began with the polynucleotide set forth in SEQ ID NO: 475. Libraries of engineered polypeptides were generated using various well-known techniques (e.g., saturation mutagenesis, recombination of previously identified beneficial amino acid differences) and screened using HTP assay and analysis methods that measured the polypeptides' ability to produce compound (3).

[0314] The enzyme assays were carried out in 96-well, deep-well (2.1 mL total volume) plates, in 100 μL. total reaction volume per well. The reactions contained 0.25 v/v % of undiluted ketoreductase lysate, prepared as described in EXAMPLE 1: 5 g/L (1), 0.5 g/L NADPH, 0.25 g/L GDH-105, 100 g/L glucose, 100 g/L sodium gluconate, dissolved in 200 mM sodium phosphate buffer at pH 7.5 with 2 mM magnesium chloride. The reaction plates were heat-sealed and shaken at 600 rpm at 45° C. for 18 hours.

[0315] After overnight incubation (˜18 hours), 700 μL/well of acetonitrile were added to the reaction plates and mixed well. The plates were sealed and centrifuged at 4,000 rpm for 10 min. An aliquot of the supernatant was removed and further diluted 500-fold into water. After dilution, the reactions were analyzed on the Agilent RapidFire 365 high throughput mass spectrometer, measuring the amount of alcohol compound (3) using the conditions in Table 2.1.

TABLE 11.1
KRED Activity for the Production of Compound (3)
Relative to SEQ ID NO: 476

| | | Percent Conversion |
|---|---|---|
| | | Fold Improvement |
| SEQ ID NO: | Amino Acid Differences | Relative to |
| (nt/aa) | (Relative to SEQ ID NO: 476) | SEQ ID NO: 476 |
| 485/486 | E190R | +++ |
| 487/488 | L17R | ++ |
| 489/490 | V43R | + |
| 491/492 | T250L | + |
| 493/494 | L17M | ++ |
| 495/496 | L17K | ++ |
| 497/498 | E45H | + |
| 499/500 | T54P | + |
| 501/502 | P194R | + |
| 503/504 | M205E | ++ |
| 505/506 | D198A | +++ |
| 507/508 | E190L | +++ |
| 509/510 | E190V | ++ |
| 511/512 | E190Q | ++ |
| 513/514 | T71G | + |
| 515/516 | L195M | + |
| 517/518 | D198R | +++ |
| 519/520 | E190A | + |
| 521/522 | T71E | + |
| 523/524 | S96R | + |

Levels of increased activity were determined relative to the reference polypeptide of SEQ ID NO: 476 and defined as follows: “+” 1.38 to 1.99, “++” > 1.99, “+++” > 3.32

[0316] Select variants were retested to check the selectivity of the KRED variants. This test was done in the presence of ERED (SEQ ID NO: 346), looking for the presence of the cis-isomer of the product and the allylic alcohol. The enzyme assays were carried out in 96-well, deep-well (2.1 mL total volume) plates, in 100 μL total reaction volume per well. The reactions contained 1 v/v % of undiluted ene reducase lysate, prepared as described in EXAMPLE 1, 5 g/L (1), 0.5 g/L NADPH, 0.25 g/L ERED (SEQ ID NO: 346), 0.25 g/L GDH-105, 100 g/L glucose, 100 g/L sodium gluconate, dissolved in 200 mM sodium phosphate buffer at pH 7.6 with 2 mM magnesium chloride. The reaction plates were heat-sealed and shaken at 600 rpm at 45° C. for 18 hours.

[0317] After overnight incubation (˜18 hours), a 50-uL aliquot of a mixture of 20% 6 M HCl and 80% isopropyl alcohol, ˜5 mg NaCl and 0.5 mL EtOAc was added to each well. The plates were sealed, shaken for 15 minutes, and centrifuged at 4,000 rpm for 5 min. A 200-uL aliquot of the EtOAc supernatant was removed. 10 uL of 2 M TMS-diazomethane were added to each well to derivatization the samples as their methyl-esters. After 1 hr at RT, the excess TMS-diazomethane was quenched with 4 uL acetic acid. These samples were then analyzed by chiral GC to determine the activity and selectivity of the enzyme variants using the analytical method described in Table 1.3. >99% enantiomeric excess was observed in all variants tested. All publications, patents, patent applications and other documents cited in this application are hereby incorporated by reference in their entireties for all purposes to the same extent as if each individual publication, patent, patent application or other document were individually indicated to be incorporated by reference for all purposes.

[0318] While various specific embodiments have been illustrated and described, it will be appreciated that various changes can be made without departing from the spirit and scope of the invention(s).

We claim:

1. An engineered enone reductase comprising a polypeptide sequence having at least 85%, 86%, 87%, 88%, 89%, 90%, 91%, 92%, 93%, 94%, 95%, 96%, 97%, 98%, or 99% sequence identity to SEQ ID NOs: 262, 10, 20, 162, 282, 294, 322, and/or 346, or a functional fragment thereof, wherein the polypeptide sequence of said engineered enone reductase comprises at least one substitution or substitution set and wherein the amino acid positions of said polypeptide sequence are numbered with reference to SEQ ID NOs: 262, 10, 20, 162, 282, 294, 322, and/or 346.

2. The engineered enone reductase of claim 1, wherein said polypeptide sequence has at least 85%, 86%, 87%, 88%, 89%, 90%, 91%, 92%, 93%, 94%, 95%, 96%, 97%, 98%, or 99% sequence identity to SEQ ID NO: 10, and wherein the polypeptide sequence of said enone reductase comprises at least one substitution or substitution set at one or more positions in said polypeptide sequence selected from 32/127/250/261/297/384, 5, 10, 13, 18/103, 19/260/363/394, 30, 32/127/250/384, 44, 56, 92, 99, 100, 103, 103/154, 107, 109, 124, 149, 154, 156, 168, 169, 172, 183, 209, 250, 250/290/384, 250/309/384, 250/384, 279, 306, 307, 341, 359, 369, 394, 398, and 399, wherein the amino acid positions of said polypeptide sequence are numbered with reference to SEQ ID NO: 10.

3. The engineered enone reductase of claim 1, wherein said polypeptide sequence of said engineered enone reductase has at least 85%, 86%, 87%, 88%, 89%, 90%, 91%, 92%, 93%, 94%, 95%, 96%, 97%, 98%, or 99% sequence identity to SEQ ID NO: 20, and wherein said polypeptide sequence of said engineered enone reductase comprises at least one substitution or substitution set at one or more positions selected from 32/44/103/107/124/127/150/250, 32/44/103/107/124/127/341/394, 32/44/107/124/127/150/183, 32/103/107/124, 32/103/107/124/127/150/250, 32/103/107/124/183/250, 32/103/107/124/209/250, 32/103/107/124/250/394, 32/103/109/154/168/183/341/398, 32/107/124/209/394, 32/124/127/250, 32/183, 32/183/341/399, 38, 40, 44/103/107/124/127, 44/103/107/124/127/183, 44/103/124/127/150/183/260, 44/103/124/250/394, 83, 103/107/124, 103/107/124/127/150, 103/107/124/209/394, 103/107/124/250, 114, 118, 124/150, 148, and 261, wherein the amino acid positions of said polypeptide sequence are numbered with reference to SEQ ID NO: 20.

4. The engineered enone reductase of claim 1, wherein said polypeptide sequence of said engineered enone reductase has at least 85%, 86%, 87%, 88%, 89%, 90%, 91%, 92%, 93%, 94%, 95%, 96%, 97%, 98%, or 99% sequence identity to SEQ ID NO: 162, and wherein said polypeptide sequence of said engineered enone reductase comprises at least one substitution or substitution set at one or more positions selected from 4, 7, 7/307, 56/378, 95, 100, 109, 127, 146/333, 161, 209, 209/378, 258, 297, 298, 299, 302, 306, 307, 333, 336, 341, 359, and 378, wherein the amino acid positions of said polypeptide sequence are numbered with reference to SEQ ID NO: 162.

5. The engineered enone reductase of claim 1, wherein said polypeptide sequence of said engineered enone reductase has at least 85%, 86%, 87%, 88%, 89%, 90%, 91%, 92%, 93%, 94%, 95%, 96%, 97%, 98%, or 99% sequence identity to SEQ ID NO: 262, and wherein said polypeptide sequence of said engineered enone reductase comprises at least one substitution or substitution set at one or more positions selected from 4/100/209/258/359/378, 4/151/307/378, 4/151/333, 4/151/359/378, 4/209/359, 4/209/359/378, 7/95/100, 95/100/326/333/378, 95/100/326/378, 95/258/378, 95/333, 100/146/151/258/359/378, 100/209/258/359, 100/378, 146/151/359/378, 209, 209/258, 209/298/359/378, 209/333/359, 258/378, 341, and 378, wherein the amino acid positions of said polypeptide sequence are numbered with reference to SEQ ID NO: 262.

6. The engineered enone reductase of claim 1, wherein said polypeptide sequence of said engineered enone reductase has at least 85%, 86%, 87%, 88%, 89%, 90%, 91%, 92%, 93%, 94%, 95%, 96%, 97%, 98%, or 99% sequence identity to SEQ ID NO: 282, and wherein said polypeptide sequence of said engineered enone reductase comprises at least one substitution or substitution set at one or more positions selected from 89, 243, and 283, wherein the amino acid positions of said polypeptide sequence are numbered with reference to SEQ ID NO: 282.

7. The engineered enone reductase of claim 1, wherein said polypeptide sequence of said engineered enone reductase has at least 85%, 86%, 87%, 88%, 89%, 90%, 91%, 92%, 93%, 94%, 95%, 96%, 97%, 98%, or 99% sequence identity to SEQ ID NO: 294, and wherein said polypeptide sequence of said engineered enone reductase comprises at least one substitution or substitution set at one or more positions selected from 47, 118, 148, 258/261, 314, 374/378, 377/378, and 378, wherein the amino acid positions of said polypeptide sequence are numbered with reference to SEQ ID NO: 294.

8. The engineered enone reductase of claim 1, wherein said polypeptide sequence of said engineered enone reductase has at least 85%, 86%, 87%, 88%, 89%, 90%, 91%, 92%, 93%, 94%, 95%, 96%, 97%, 98%, or 99% sequence identity to SEQ ID NO: 322, and wherein said polypeptide sequence of said engineered enone reductase comprises at least one substitution or substitution set at one or more positions selected from 47/89/95/148/258/261, 47/89/95/243/258/261/378, 47/89/258, 47/95, 89/95/243, 95/148, 95/148/243/258/261, 95/148/243/261, 95/148/258/261, 95/243, 100/243, 100/243/374, and 148/243, wherein the amino acid positions of said polypeptide sequence are numbered with reference to SEQ ID NO: 322.

9. The engineered enone reductase of claim 1, wherein said polypeptide sequence of said engineered enone reductase has at least 85%, 86%, 87%, 88%, 89%, 90%, 91%, 92%, 93%, 94%, 95%, 96%, 97%, 98%, or 99% sequence identity to SEQ ID NO: 346, and wherein said polypeptide sequence of said engineered enone reductase comprises at least one substitution or substitution set at one or more positions selected from 10, 11, 13, 20, 21, 29, 64, 99, 99/398, 108, 175, 235, 243, 320, 333, 388, 392, 393, and 397, wherein the amino acid positions of said polypeptide sequence are numbered with reference to SEQ ID NO: 346.

10. An engineered ketoreductase comprising a polypeptide sequence having at least 85%, 86%, 87%, 88%, 89%, 90%, 91%, 92%, 93%, 94%, 95%, 96%, 97%, 98%, or 99% sequence identity to SEQ ID NOs: 432 and/or 476, or a functional fragment thereof, wherein the polypeptide sequence of said engineered ketoreductase comprises at least one substitution or substitution set and wherein the amino acid positions of said polypeptide sequence are numbered with reference to SEQ ID NOs: 432 and/or 476.

11. The engineered ketoreductase of claim 10, wherein said polypeptide sequence of said engineered ketoreductase has at least 85%, 86%, 87%, 88%, 89%, 90%, 91%, 92%, 93%, 94%, 95%, 96%, 97%, 98%, or 99% sequence identity to SEQ ID NO: 432, and wherein the polypeptide sequence of said ketoreductase comprises at least one substitution or substitution set at one or more positions in said polypeptide sequence selected from 21/103, 2/72, 2/72/172, 21, 21/65/72/73/103, 21/65/72/131/147/181, 21/65/72/147, 21/65/103/152, 21/65/131/152, 21/65/147/152, 21/65/152, 21/72/73/103, 21/72/103, 21/72/103/131/152/226, 21/72/103/147, 21/72/103/147/152/181, 21/72/131/181/197, 21/72/152/181, 21/73/103, 21/73/131/147, 21/73/147, 21/73/181, 21/103, 21/103/147, 21/103/147/152, 21/147, and 26/173/221, wherein the amino acid positions of said polypeptide sequence are numbered with reference to SEQ ID NO: 432.

12. The engineered ketoreductase of claim 10, wherein said polypeptide sequence of said engineered ketoreductase has at least 85%, 86%, 87%, 88%, 89%, 90%, 91%, 92%, 93%, 94%, 95%, 96%, 97%, 98%, or 99% sequence identity to SEQ ID NO: 476, and wherein said polypeptide sequence of said engineered ketoreductase comprises at least one substitution or substitution set at one or more positions selected from 17, 43, 45, 54, 71, 96, 190, 194, 195, 198, 205, and 250, wherein the amino acid positions of said polypeptide sequence are numbered with reference to SEQ ID NO: 476.

13. The engineered enone reductase of claim 1, wherein said engineered enone reductase comprises a variant engineered enone reductase set forth in SEQ ID NOs: 10, 20, 162, 262, 282, 294, 322, and/or 346.

14. The engineered ketoreductase of claim 10, wherein said engineered ketoreductase comprises a variant engineered ketoreductase set forth in SEQ ID NOs: 432, and/or 476.

15. The engineered enone reductase of claim 1, wherein said engineered enone reductase comprises a polypeptide sequence that is at least 85%, 86%, 87%, 88%, 89%, 90%, 91%, 92%, 93%, 94%, 95%, 96%, 97%, 98%, 99% or more identical to the sequence of at least one engineered enone reductase variant set forth in the even numbered sequences of SEQ ID NOs: 12-430.

16. The engineered ketoreductase of claim 10, wherein said engineered ketoreductase comprises a polypeptide sequence that is at least 85%, 86%, 87%, 88%, 89%, 90%, 91%, 92%, 93%, 94%, 95%, 96%, 97%, 98%, 99% or more identical to the sequence of at least one engineered ketoreductase variant set forth in the even numbered sequences of SEQ ID NOs: 434-524.

17. The engineered enone reductase of claim 1, wherein said engineered enone reductase comprises a polypeptide sequence set forth in at least one of the even numbered sequences of SEQ ID NOs: 12-430.

18. The engineered ketoreductase of claim 10, wherein said engineered ketoreductase comprises a polypeptide sequence set forth in at least one of the even numbered sequences of SEQ ID NOs: 434-524.

19. The engineered enone reductase of claim 1, wherein said engineered enone reductase comprises at least one improved property compared to a wild-type enone reductase or another engineered enone reductase.

20. The engineered ketoreductase of claim 10, wherein said engineered ketoreductase comprises at least one improved property compared to a wild-type ketoreductase or another engineered ketoreductase.

21. The engineered enone reductase of claim 19, wherein said improved property comprises improved activity on a substrate.

22. The engineered ketoreductase of claim 20, wherein said improved property comprises improved activity on a substrate.

23. The engineered enone reductase of claim 21, wherein said substrate comprises compound (1).

24. The engineered ketoreductase of claim 22, wherein said substrate comprises compound (2).

25. The engineered enone reductase of claim 1, wherein said engineered enone reductase is purified.

26. The engineered ketoreductase of claim 10, wherein said engineered ketoreductase is purified.

27. A polynucleotide sequence encoding at least one engineered enone reductase of claim 1.

28. A polynucleotide sequence encoding at least one engineered enone reductase comprising at least 85%, 86%, 87%, 88%, 89%, 90%, 91%, 92%, 93%, 94%, 95%, 96%, 97%, 98%, or 99% sequence identity to SEQ ID NOs: 9, 19, 161, 261, 281, 293, 321, and/or 345, or a functional fragment thereof.

29. The polynucleotide sequence of claim 27, wherein said polynucleotide sequence is operably linked to a control sequence.

30. The polynucleotide sequence of claim 27, wherein said polynucleotide sequence is codon optimized.

31. The polynucleotide sequence of claim 27, wherein said polynucleotide sequence comprises a polynucleotide sequence set forth in the odd numbered sequences of SEQ ID NOs: 11-429.

32. An expression vector comprising at least one polynucleotide sequence of claim 27.

33. A host cell comprising at least one polynucleotide sequence of claim 27.

34. A method of producing an engineered enone reductase in a host cell, comprising culturing the host cell of claim 33, under suitable conditions, such that at least one engineered enone reductase is produced.

35. A polynucleotide sequence encoding at least one engineered ketoreductase of claim 10.

36. A polynucleotide sequence encoding at least one engineered ketoreductase comprising at least 85%, 86%, 87%, 88%, 89%, 90%, 91%, 92%, 93%, 94%, 95%, 96%, 97%, 98%, or 99% sequence identity to SEQ ID NOs: 432 and/or 476, or a functional fragment thereof.

37. The polynucleotide sequence of claim 35, wherein said polynucleotide sequence is operably linked to a control sequence.

38. The polynucleotide sequence of claim 35, wherein said polynucleotide sequence is codon optimized.

39. The polynucleotide sequence of claim 35, wherein said polynucleotide sequence comprises a polynucleotide sequence set forth in the odd numbered sequences of SEQ ID NOs: 433-523.

40. An expression vector comprising at least one polynucleotide sequence of claim 35.

41. A host cell comprising at least one polynucleotide sequence of claim 35.

42. A method of producing an engineered ketoreductase in a host cell, comprising culturing the host cell of claim 41, under suitable conditions, such that at least one engineered ketoreductase is produced.

The application's sequence listing, which the Patent Office published only in electronic form, follows.

SEQUENCE LISTING (524 sequences)

SEQ ID NO: 1 - DNA, 1203 bp, synthetic construct
  misc_feature 1..1203: note = Old Yellow Enzyme 1 from Saccharomyces pastorianus
  source 1..1203: mol_type = other DNA
atgtctttcgttaaggacttcaagccgcaggcactgggcgacaccaacctgttcaaacctattaaaattgggaacaacgagctgctgcatcgcgcggtaattcctccgctgacccgcatgcgcgctctgcatccgggcaacattccgaaccgtgattgggctgtggaatactacacccagcgtgcacagcgtccggggacaatgattatcacggagggtgcgttcatcagcccgcaggcaggtgggtacgataacgcgcctggtgtttggtcagaagaacagatggtcgaatggacgaaaatcttcaacgctattcatgaaaaaaagtcatttgtgtgggtgcaactgtgggtcctgggctgggccgcctttccggataacctggcgcgtgatgggttacgttacgattctgcctccgataatgtgtttatggatgcggaacaggaggcaaaagcgaaaaaagctaacaatccgcaacatagcttgactaaagacgaaattaaacaatatatcaaagaatatgttcaggcagctaagaactcgatcgctgcgggtgcggacggcgtggaaattcactcagccaacggttatctgttaaatcagttcctggatccgcacagcaacacacgcaccgatgagtatgggggctcaattgaaaatcgtgcacgttttactctggaagtcgttgacgcgctggttgaggccatcggccatgaaaaagtgggtttacgtctgagtccgtacggcgttttcaactctatgtcgggcggcgcggaaacgggcattgttgctcagtatgcctatgtcgcgggtgagctggagaaacgcgccaaggcggggaaacgcctggcgtttgttcatttagtcgaaccacgcgtgacaaacccttttctgactgagggggagggcgaatacgaagggggcagcaacgattttgtttattccatttggaaaggtccggttatccgtgccggcaacttcgcactgcaccctgaagttgtgcgcgaagaagttaaggacaaacgcaccctgatcggctacggccgcttctttatttcaaatccagacctggttgaccgcttagaaaaaggtctgccactgaacaagtatgaccgtgatacgttctaccagatgagcgcgcatggttacatcgactacccgacctacgaagaagccttaaaactgggctgggacaaaaaataa

SEQ ID NO: 2 - protein, 400 aa, synthetic construct
  REGION 1..400: note = Old Yellow Enzyme 1 from Saccharomyces pastorianus
MSFVKDFKPQALGDTNLFKPIKIGNNELLHRAVIPPLTRMRALHPGNIPNRDWAVEYYTQRAQRPGTMIITEGAFISPQAGGYDNAPGVWSEEQMVEWTKIFNAIHEKKSFVWVQLWVLGWAAFPDNLARDGLRYDSASDNVFMDAEQEAKAKKANNPQHSLTKDEIKQYIKEYVQAAKNSIAAGADGVEIHSANGYLLNQFLDPHSNTRTDEYGGSIENRARFTLEVVDALVEAIGHEKVGLRLSPYGVFNSMSGGAETGIVAQYAYVAGELEKRAKAGKRLAFVHLVEPRVTNPFLTEGEGEYEGGSNDFVYSIWKGPVIRAGNFALHPEVVREEVKDKRTLIGYGRFFISNPDLVDRLEKGLPLNKYDRDTFYQMSAHGYIDYPTYEEALKLGWDKK

SEQ ID NO: 3 - DNA, 1203 bp, synthetic construct
  misc_feature 1..1203: note = Old Yellow Enzyme 2 from Saccharomyces cerevisiae
  source 1..1203: mol_type = other DNA
atgcctttcgttaaggacttcaagccgcaggcactgggcgacaccaacctgttcaaacctattaaaattgggaacaacgagctgctgcatcgcgcggtaattcctccgctgacccgcatgcgcgctcagcatccgggcaacattccgaaccgtgattgggctgtggaatactacgcccagcgtgcacagcgtccggggacactgattatcacggagggtacgttccctagcccgcagtcaggtgggtacgataacgcgcctggtatttggtcagaagaacagattaaagaatggacgaaaatcttcaaggctattcatgaaaataagtcatttgcgtgggtgcaactgtgggtcctgggctgggccgcctttccggatacgctggcgcgtgatgggttacgttacgattctgcctccgataatgtgtatatgaatgcggaacaggaggaaaaagcgaaaaaagctaacaatccgcaacatagcattactaaagacgaaattaaacaatatgtcaaagaatatgttcaggcagctaagaactcgatcgctgcgggtgcggacggcgtggaaattcactcagccaacggttatctgttaaatcagttcctggatccgcacagcaacaaccgcaccgatgagtatgggggctcaattgaaaatcgtgcacgttttactctggaagtcgttgacgcggtggttgatgccatcggcccagaaaaagtgggtttacgtctgagtccgtacggcgttttcaactctatgtcgggcggcgcggaaacgggcattgttgctcagtatgcctatgtcctgggtgagctggagcgtcgcgccaaggcggggaaacgcctggcgtttgttcatttagtcgaaccacgcgtgacaaacccttttctgactgagggggagggcgaatacaacgggggcagcaacaaatttgcttattccatttggaaaggtccgattatccgtgccggcaacttcgcactgcaccctgaagttgtgcgcgaagaagttaaggaccctcgcaccctgatcggctacggccgcttctttatttcaaatccagacctggttgaccgcttagaaaaaggtctgccactgaacaagtatgaccgtgatacgttctacaaaatgagcgcggagggttacatcgactacccgacctacgaagaagccttaaaactgggctgggacaaaaactaa

SEQ ID NO: 4 - protein, 400 aa, synthetic construct
  REGION 1..400: note = Old Yellow Enzyme 2 from Saccharomyces cerevisiae
MPFVKDFKPQALGDTNLFKPIKIGNNELLHRAVIPPLTRMRAQHPGNIPNRDWAVEYYAQRAQRPGTLIITEGTFPSPQSGGYDNAPGIWSEEQIKEWTKIFKAIHENKSFAWVQLWVLGWAAFPDTLARDGLRYDSASDNVYMNAEQEEKAKKANNPQHSITKDEIKQYVKEYVQAAKNSIAAGADGVEIHSANGYLLNQFLDPHSNNRTDEYGGSIENRARFTLEVVDAVVDAIGPEKVGLRLSPYGVFNSMSGGAETGIVAQYAYVLGELERRAKAGKRLAFVHLVEPRVTNPFLTEGEGEYNGGSNKFAYSIWKGPIIRAGNFALHPEVVREEVKDPRTLIGYGRFFISNPDLVDRLEKGLPLNKYDRDTFYKMSAEGYIDYPTYEEALKLGWDKN

SEQ ID NO: 5 - DNA, 1203 bp, synthetic construct
  misc_feature 1..1203: note = Old Yellow Enzyme 3 from Saccharomyces cerevisiae
  source 1..1203: mol_type = other DNA
atgcctttcgttaagggcttcgagccgatttcactgcgcgacaccaacctgttcgaacctattaaaattgggaacacacagctggctcatcgcgcggtaatgcctccgctgacccgcatgcgcgctacccatccgggcaacattccgaacaaggagtgggctgcggtttactacggccagcgtgcacagcgtccggggacaatgattatcacggagggtacgttcatcagcccgcaggcaggtgggtacgataacgcgcctggtatttggtcagacgaacaggttgccgaatggaagaacatcttcctggctattcatgactgtcagtcatttgcgtgggtgcaactgtggagcctgggctgggcctcctttccggatgtgctggcgcgtgatgggttacgttacgattgtgcctccgatcgtgtgtatatgaatgcgacactgcaggaaaaagcgaaagatgctaacaatctggaacatagcttgactaaagacgatattaaacaatatatcaaagattatattcatgcagctaagaactcgatcgctgcgggtgcggacggcgtggaaattcactcagccaacggttatctgttaaatcagttcctggatccgcacagcaacaaacgcaccgatgagtatgggggcacaattgaaaatcgtgcacgttttactctggaagtcgttgacgcgctgattgagaccatcggcccagaacgcgtgggtttacgtctgagtccgtacggcactttcaactctatgtcgggcggcgcggaaccgggcattattgctcagtatagctatgtcctgggtgagctggagaaacgcgccaaggcggggaaacgcctggcgtttgttcatttagtcgaaccacgcgtgacagacccttctctggttgagggggagggcgaatactcagagggcaccaacgattttgcttattccatttggaaaggtccgattatccgtgccggcaactacgcactgcaccctgaagttgtgcgcgaacaagttaaggaccctcgcaccctgatcggctacggccgcttctttatttcaaatccagacctggtttaccgcttagaagaaggtctgccactgaacaagtatgaccgttctacgttctacaccatgagcgcggagggttacaccgactacccgacctacgaagaagccgtagatctgggctggaacaaaaactaa

SEQ ID NO: 6 - protein, 400 aa, synthetic construct
  REGION 1..400: note = Old Yellow Enzyme 3 from Saccharomyces cerevisiae
MPFVKGFEPISLRDTNLFEPIKIGNTQLAHRAVMPPLTRMRATHPGNIPNKEWAAVYYGQRAQRPGTMIITEGTFISPQAGGYDNAPGIWSDEQVAEWKNIFLAIHDCQSFAWVQLWSLGWASFPDVLARDGLRYDCASDRVYMNATLQEKAKDANNLEHSLTKDDIKQYIKDYIHAAKNSIAAGADGVEIHSANGYLLNQFLDPHSNKRTDEYGGTIENRARFTLEVVDALIETIGPERVGLRLSPYGTFNSMSGGAEPGIIAQYSYVLGELEKRAKAGKRLAFVHLVEPRVTDPSLVEGEGEYSEGTNDFAYSIWKGPIIRAGNYALHPEVVREQVKDPRTLIGYGRFFISNPDLVYRLEEGLPLNKYDRSTFYTMSAEGYTDYPTYEEAVDLGWNKN

SEQ ID NO: 7 - DNA, 759 bp, synthetic construct
  misc_feature 1..759: note = Ketone Reductase from L. kefir
  source 1..759: mol_type = other DNA
atgaccgatcgtctgaagggcaaagtagccatcgtaaccggcgggactctgggtatcggtttggcaatcgccgataaatttgtagaggagggtgcgaaagtagttattactggtcgtcacgcggatgtaggtgaaaaggccgccaaatcaatcggcggcactgatgttattcgctttgtccagcacgatgcatccgatgaagcaggctggacgaaactgttcgacaccaccgaggaggcattcggcccggttacgaccgtcgtgaacaatgcagggattgcagtttccaaaagcgttgaagacactaccacggaggaatggcgtaaactgctgtccgttaatctggatggtgtttttttcggcacccgtctgggcattcagcgcatgaaaaataaaggcttgggcgctagcatcatcaatatgagcagtattgaggggttcgtaggcgatccgacgctgggggcatacaacgcttccaagggggcggtacgtatcatgtcgaaaagcgcagcgctggattgcgcactgaaggactacgatgtgcgtgtcaacacagtacatccgggctatatcaagaccccgctggtcgatgatctggaaggtgctgaggaaatgatgtcacagcgtacgaaaacccctatgggccacattggcgaaccgaatgacatcgcatggatctgtgtgtacctggcatctgacgaatcgaaatttgcgacgggtgcagaatttgtggtcgacggcgggtataccgcacagtga

SEQ ID NO: 8 - protein, 252 aa, synthetic construct
  REGION 1..252: note = Ketone Reductase from L. kefir
MTDRLKGKVAIVTGGTLGIGLAIADKFVEEGAKVVITGRHADVGEKAAKSIGGTDVIRFVQHDASDEAGWTKLFDTTEEAFGPVTTVVNNAGIAVSKSVEDTTTEEWRKLLSVNLDGVFFGTRLGIQRMKNKGLGASIINMSSIEGFVGDPTLGAYNASKGAVRIMSKSAALDCALKDYDVRVNTVHPGYIKTPLVDDLEGAEEMMSQRTKTPMGHIGEPNDIAWICVYLASDESKFATGAEFVVDGGYTAQ

SEQ ID NO: 9 - DNA, 1200 bp, synthetic construct
  misc_feature 1..1200: note = ERED chimera of Old Yellow Enzyme
  source 1..1200: mol_type = other DNA
atgtctttcgttaaggacttcaagccgcaggcactgcgcgacaccaacctgttcgaacctattaaaattgggaacacacagctggctcatcgcgcggtaatgcctccgctgacccgcatgcgcgctacccatccgggcaacattccgaacaaggagtgggctgcggtttactacggccagcgtgcacagcgtccggggacaatgattatcacggaggcgacgttcatcagcccgcaggcaggtgggtacgataacaagcctggtgtttggtcagacgaacaggttgccgaatggaagaacatcttcctggctattcatgactgtcagtcatttgcgtgggtgcaactgcaggtcctgggctgggccgcctttccggataacctggcgcgtgatgggttacgttacgattctgcctccgataatgtgtatatgaatgcggaacaggaggaaaaagcgaaaaaagctaacaatccgcaacatagcattactaaagacgaaattaaacaatatgtcaaagaatatgttcaggcagctaagaactcgatcgctgcgggtgcggacggcgtggaaattcactcagccaacggttatctgttaaatcagttcctggatccgcacagcaacaaccgcaccgatgagtatgggggctcaattgaaaatcgtgcacgttttactctggaagtcgttgacgcggtggttgatgccatcggcccagaaaaagtgggtttacgtctgagtccgtacggcgttttcaactctatgtcgggcggcgcggaaacgggcattgttgctcagtatgcctatgtcctgggtgagctggagcgtcgcgccaaggcggggaaacgcctggcgtttgttcatttagtcgaaccacgcgtgacagacccttctctggttgagggggagggcgaatactcagagggcaccaacgattttgcttattccatttggaaaggtccgattatccgtgccggcaactacgcactacatcctgaagtagtgcgcgaacaagttaaggaccctcgcaccctgatcggctacggccgcttctttatttcaaatccagacctggtttaccgcttagaagaaggtctgccactgaacaagtatgaccgttctacgttctacaccatgagcgcggagggttacaccgactacccgacctacgaagaagccgtagatctgggctggaacaaaaac

SEQ ID NO: 10 - protein, 400 aa, synthetic construct
  REGION 1..400: note = ERED chimera of Old Yellow Enzyme
MSFVKDFKPQALRDTNLFEPIKIGNTQLAHRAVMPPLTRMRATHPGNIPNKEWAAVYYGQRAQRPGTMIITEATFISPQAGGYDNKPGVWSDEQVAEWKNIFLAIHDCQSFAWVQLQVLGWAAFPDNLARDGLRYDSASDNVYMNAEQEEKAKKANNPQHSITKDEIKQYVKEYVQAAKNSIAAGADGVEIHSANGYLLNQFLDPHSNNRTDEYGGSIENRARFTLEVVDAVVDAIGPEKVGLRLSPYGVFNSMSGGAETGIVAQYAYVLGELERRAKAGKRLAFVHLVEPRVTDPSLVEGEGEYSEGTNDFAYSIWKGPIIRAGNYALHPEVVREQVKDPRTLIGYGRFFISNPDLVYRLEEGLPLNKYDRSTFYTMSAEGYTDYPTYEEAVDLGWNKN

SEQ ID NO: 11 - DNA, 1200 bp, synthetic construct
  misc_feature 1..1200: note = ERED chimera of Old Yellow Enzyme
  source 1..1200: mol_type = other DNA
atgtctttcgttaaggacttcaagccgcaggcactgcgcgacaccaacctgttcaagcctattaaaattgggaacacacagctggctcatcgcgcggtaatgcctccgctgactcgcatgcgcgctacccatccgggcaacattccgaacaaggagtgggctgcggtttactacggccagcgtgcacagcgtccggggacaatgattatcacggaggcgacgttcatcagcccgcaggcaggtgggtacgataacaagcctggtgtttggtcagacgaacaggttgccgaatggaagaacatcttcctggctattcatgactgtcagtcatttgcgtgggtgcaactgcaggtcctgggctgggccgcctttccggataacctggcgcgtgatgggttacgttacgattctgcctccgataatgtgtatatgaatgcggaacaggaggaaaaagcgaaaaaagctaacaatccgcaacatagcattactaaagacgaaattaaacaatatgtcaaagaatatgttcaggcagctaagaactcgatcgctgcgggtgcggacggcgtggaaattcactcagccaacggttatctgttaaatcagttcctggatccgcacagcaacaaccgcaccgatgagtatgggggctcaattgaaaatcgtgcacgttttactctggaagtcgttgacgcggtggttgatgccatcggcccagaaaaagtgggtttacgtctgagtccgtacggcgttttcaactctatgtcgggcggcgcggaaccgggcattgttgctcagtatgcctatgtcctgggtgagctggagcgtcgcgccaaggcggggaaacgcctggcgtttgttcatttagtcgaaccacgcgtgacagacccttctctggttgagggggagggcgaatactcagagggcaccaacgattttgcttattccatttggaaaggtccgattatccgtgccggcaactacgcactacatcctgaagtagtgcgcgaacaagttaaggaccctcgcaccctgatcggctacggccgcttctttatttcaaatccagacctggtttaccgcttagaaaaaggtctgccactgaacaagtatgaccgttctacgttctacaccatgagcgcggagggttacaccgactacccgacctacgaagaagccgtaaaactgggctggaataaaaac

SEQ ID NO: 12 - protein, 400 aa, synthetic construct
  REGION 1..400: note = ERED chimera of Old Yellow Enzyme
MSFVKDFKPQALRDTNLFKPIKIGNTQLAHRAVMPPLTRMRATHPGNIPNKEWAAVYYGQRAQRPGTMIITEATFISPQAGGYDNKPGVWSDEQVAEWKNIFLAIHDCQSFAWVQLQVLGWAAFPDNLARDGLRYDSASDNVYMNAEQEEKAKKANNPQHSITKDEIKQYVKEYVQAAKNSIAAGADGVEIHSANGYLLNQFLDPHSNNRTDEYGGSIENRARFTLEVVDAVVDAIGPEKVGLRLSPYGVFNSMSGGAEPGIVAQYAYVLGELERRAKAGKRLAFVHLVEPRVTDPSLVEGEGEYSEGTNDFAYSIWKGPIIRAGNYALHPEVVREQVKDPRTLIGYGRFFISNPDLVYRLEKGLPLNKYDRSTFYTMSAEGYTDYPTYEEAVKLGWNKN

SEQ ID NO: 13 - DNA, 1200 bp, synthetic construct
  misc_feature 1..1200: note = ERED chimera of Old Yellow Enzyme
  source 1..1200: mol_type = other DNA
atgtctttcgttaaggacttcaagccgcaagcactgcgcgacaccaacctgttcgaacctattaaaattgggaacacacagctggctcatcgcgcggtaatgcctccgctgacccgcatgcgcgctacccatccgggcaacattccgaacaaggagtgggctgcggtttactacggccagcgtgcacagcgtccggggacaatgattatcacggaggcgacgttcatcagcccgcaggcaggtgggtacgataacaagcctggtgtttggtcagacgaacaggttgccgaatggaagaacatcttcctggctattcatgactgtcagtcatttgcgtgggtgcaactgcaggtcctgggctgggccgcctttccggataacctggcgcgtgatgggttacgttacgattctgcctccgataatgtgtatatgaatgcggaacaggaggaaaaagcgaaaaaagctaacaatccgcaacatagcattactaaagacgaaattaaacaatatgtcaaagaatatgttcaggcagctaagaactcgatcgctgcgggtgcggacggcgtggaaattcactcagccaacggttatctgttaaatcagttcctggatccgcacagcaacaaccgcaccgatgagtatgggggctcaattgaaaatcgtgcacgttttactctggaagtcgttgacgcggtggttgatgccatcggcccagaaaaagtgggtttacgtctgagtccgtacggcacgttcaactctatgtcgggcggcgcggaaacgggcattgttgctcagtatgcctatgtcctgggtgagctggagcgtcgcgccaaggcggggaaacgcctggcgtttgttcatttagtcgaaccacgcgtgacagacccttctctggttgagggggagggcgaatactcagagggcagtaacgattttgcttattccatttggaaaggtccgattatccgtgccggcaactatgcactacatcctgaagtagtgcgcgaacaagttaaggaccctcgcaccctgatcggctacggccgcttctttatttcaaatccagacctggtttaccgcttagaagaaggtctgccactgaacaagtatgaccgttctacgttctacaccatgagcgcggagggttacatcgactacccgacctacgaagaagccgtagatctgggctggaacaaaaac

SEQ ID NO: 14 - protein, 400 aa, synthetic construct
  REGION 1..400: note = ERED chimera of Old Yellow Enzyme
MSFVKDFKPQALRDTNLFEPIKIGNTQLAHRAVMPPLTRMRATHPGNIPNKEWAAVYYGQRAQRPGTMIITEATFISPQAGGYDNKPGVWSDEQVAEWKNIFLAIHDCQSFAWVQLQVLGWAAFPDNLARDGLRYDSASDNVYMNAEQEEKAKKANNPQHSITKDEIKQYVKEYVQAAKNSIAAGADGVEIHSANGYLLNQFLDPHSNNRTDEYGGSIENRARFTLEVVDAVVDAIGPEKVGLRLSPYGTFNSMSGGAETGIVAQYAYVLGELERRAKAGKRLAFVHLVEPRVTDPSLVEGEGEYSEGSNDFAYSIWKGPIIRAGNYALHPEVVREQVKDPRTLIGYGRFFISNPDLVYRLEEGLPLNKYDRSTFYTMSAEGYIDYPTYEEAVDLGWNKN

SEQ ID NO: 15 - DNA, 1200 bp, synthetic construct
  misc_feature 1..1200: note = ERED chimera of Old Yellow Enzyme
  source 1..1200: mol_type = other DNA
atgtctttcgttaaggacttcaagccgcaagcactgcgcgacaccaacctgttcgaacctattaaaattgggaacacacagctggctcatcgcgcggtaatgcctccgctgacccgcatgcgcgctacccatccgggcaacattccgaacaaggagtgggctgcggtttactacggccagcgtgcacagcgtccggggacaatgattatcacggaggcgacgttcatcagcccgcaggcaggtgggtacgataacaagcctggtgtttggtcagacgaacaggttgccgaatggaagaacatcttcctggctattcatgactgtcagtcatttgcgtgggtgcaactgcaggtcctgggctgggccgcctttccggataacctggcgcgtgatgggttacgttacgattctgcctccgataatgtgtatatgaatgcggaacaggaggaaaaagcgaaaaaagctaacaatccgcaacatagcattactaaagacgaaattaaacaatatgtcaaagaatatgttcaggcagctaagaactcgatcgctgcgggtgcggacggcgtggaaattcactcagccaacggttatctgttaaatcagttcctggatccgcacagcaacaaccgcaccgatgagtatgggggctcaattgaaaatcgtgcacgttttactctggaagtcgttgacgcggtggttgatgccatcggcccagaaaaagtgggtttacgtctgagtccgtacggcacgttcaactctatgtcgggcggcgcggaaacgggcattgttgctcagtatgcctatgtcctgggtgagctggagcgtcgcgccaaggcggggaaacgcctggcgtttgttcatttagtcaaaccacgcgtgacagacccttctctggttgagggggagggcgaatactcagagggcaccaacgattttgcttattccatttggaaaggtccgattatccgtgccggcaactatgcactacatcctgaagtagtgcgcgaacaagttaaggaccctcgcaccctgatcggctacggccgcttctttatttcaaatccagacctggtttaccgcttagaagaaggtctgccactgaacaagtatgaccgttctacgttctacaccatgagcgcggagggttacatcgactacccgacctacgaagaagccgtagatctgggctggaacaaaaac

SEQ ID NO: 16 - protein, 400 aa, synthetic construct
  REGION 1..400: note = ERED chimera of Old Yellow Enzyme
MSFVKDFKPQALRDTNLFEPIKIGNTQLAHRAVMPPLTRMRATHPGNIPNKEWAAVYYGQRAQRPGTMIITEATFISPQAGGYDNKPGVWSDEQVAEWKNIFLAIHDCQSFAWVQLQVLGWAAFPDNLARDGLRYDSASDNVYMNAEQEEKAKKANNPQHSITKDEIKQYVKEYVQAAKNSIAAGADGVEIHSANGYLLNQFLDPHSNNRTDEYGGSIENRARFTLEVVDAVVDAIGPEKVGLRLSPYGTFNSMSGGAETGIVAQYAYVLGELERRAKAGKRLAFVHLVKPRVTDPSLVEGEGEYSEGTNDFAYSIWKGPIIRAGNYALHPEVVREQVKDPRTLIGYGRFFISNPDLVYRLEEGLPLNKYDRSTFYTMSAEGYIDYPTYEEAVDLGWNKN

SEQ ID NO: 17 - DNA, 1200 bp, synthetic construct
  misc_feature 1..1200: note = ERED chimera of Old Yellow Enzyme
  source 1..1200: mol_type = other DNA
atgtctttcgttaaggacttcaagccgcaagcactgcgcgacaccaacctgttcgaacctattaaaattgggaacacacagctggctcatcgcgcggtaatgcctccgctgacccgcatgcgcgctacccatccgggcaacattccgaacaaggagtgggctgcggtttactacggccagcgtgcacagcgtccggggacaatgattatcacggaggcgacgttcatcagcccgcaggcaggtgggtacgataacaagcctggtgtttggtcagacgaacaggttgccgaatggaagaacatcttcctggctattcatgactgtcagtcatttgcgtgggtgcaactgcaggtcctgggctgggccgcctttccggataacctggcgcgtgatgggttacgttacgattctgcctccgataatgtgtatatgaatgcggaacaggaggaaaaagcgaaaaaagctaacaatccgcaacatagcattactaaagacgaaattaaacaatatgtcaaagaatatgttcaggcagctaagaactcgatcgctgcgggtgcggacggcgtggaaattcactcagccaacggttatctgttaaatcagttcctggatccgcacagcaacaaccgcaccgatgagtatgggggctcaattgaaaatcgtgcacgttttactctggaagtcgttgacgcggtggttgatgccatcggccctgaaaaagtgggtttacgtctgagtccgtacggcacgttcaactctatgtcgggcggcgcggaaacgggcattgttgctcagtatgcctatgtcctgggtgagctggagcgtcgcgccaaggcggggaaacgcctggcgtttgttcatttagtcgaaccacgcgtgacagacccttctctggttgagggggagggcgaatactcagagggcactaacgattttgcttattccatttggaaaggtccgattatccgtgccggcaactatgcactacatcctgaagtagtgcgcgaacaagttaaggaccctcgcaccctgatcggctacggccgcttctttatttcaaatccagacctggtttaccgcttagaagaaggtctgccactgaacaagtatgaccgttctacgttctacaccatgagcgcggagggttacatcgactacccgacctacgaagaagccgtagatctgggctggaacaaaaac

SEQ ID NO: 18 - protein, 400 aa, synthetic construct
  REGION 1..400: note = ERED chimera of Old Yellow Enzyme
MSFVKDFKPQALRDTNLFEPIKIGNTQLAHRAVMPPLTRMRATHPGNIPNKEWAAVYYGQRAQRPGTMIITEATFISPQAGGYDNKPGVWSDEQVAEWKNIFLAIHDCQSFAWVQLQVLGWAAFPDNLARDGLRYDSASDNVYMNAEQEEKAKKANNPQHSITKDEIKQYVKEYVQAAKNSIAAGADGVEIHSANGYLLNQFLDPHSNNRTDEYGGSIENRARFTLEVVDAVVDAIGPEKVGLRLSPYGTFNSMSGGAETGIVAQYAYVLGELERRAKAGKRLAFVHLVEPRVTDPSLVEGEGEYSEGTNDFAYSIWKGPIIRAGNYALHPEVVREQVKDPRTLIGYGRFFISNPDLVYRLEEGLPLNKYDRSTFYTMSAEGYIDYPTYEEAVDLGWNKN

SEQ ID NO: 19 - DNA, 1200 bp, synthetic construct
  misc_feature 1..1200: note = Variant of ERED chimera of Old Yellow Enzyme
  source 1..1200: mol_type = other DNA
atgtctttcgttaaggacttcaagccgcaagcactgcgcgacaccaacctgttcgaacctattaaaattgggaacacacagctggctcatcgcgttgtaatgcctccgctgacccgcatgcgcgctacccatccgggcaacattccgaacaaggagtgggctgcggtttactacggccagcgtgcacagcgtccggggacaatgattatcacggaggcgacgttcatcagcccgcaggcaggtgggtacgataacaagcctggtgtttggtcagacgaacaggttgccgaatggaagaacatcttcctggctattcatgactgtcagtcatttgcgtgggtgcaactgcaggtcctgggctgggccgcctttccggataccctggcgcgtgatgggttacgttacgattctgcctccgataatgtgtatatgaatgcggaacaggaggaaaaagcgaaaaaagctaacaatccgcaacatagcattactaaagacgaaattaaacaatatgtcaaagaatatgttcaggcagctaagaactcgatcgctgcgggtgcggacggcgtggaaattcactcagccaacggttatctgttaaatcagttcctggatccgcacagcaacaaccgcaccgatgagtatgggggctcaattgaaaatcgtgcacgttttactctggaagtcgttgacgcggtggttgatgccatcggcccagaaaaagtgggtttacgtctgagtccgtacggcacgttcaactctatgtcgggcggcgcggaaacgggcattgttgctcagtatgcctatgtcctgggtgagctggagcgtcgcgccaaggcggggaaacgcctggcgtttgttcatttagtcgaaccacgcgtgacagacccttctctggttgagggggagggcgaatactcagagggcactaacgattttgcttattccatttggaaaggtccgattatccgtgccggcaactatgcactacatcctgaagtagtgcgcgaacaagttaaggaccctcgcaccctgatcggctacggccgcttctttatttcaaatccagacctggtttaccgcttagaagaaggtctgccactgaacaagtatgaccgttctacgttctacaccatgagcgcggagggttacatcgactacccgacctacgaagaagccgtagatctgggctggaacaaaaac

SEQ ID NO: 20 - protein, 400 aa, synthetic construct
  REGION 1..400: note = Variant of ERED chimera of Old Yellow Enzyme
MSFVKDFKPQALRDTNLFEPIKIGNTQLAHRVVMPPLTRMRATHPGNIPNKEWAAVYYGQRAQRPGTMIITEATFISPQAGGYDNKPGVWSDEQVAEWKNIFLAIHDCQSFAWVQLQVLGWAAFPDTLARDGLRYDSASDNVYMNAEQEEKAKKANNPQHSITKDEIKQYVKEYVQAAKNSIAAGADGVEIHSANGYLLNQFLDPHSNNRTDEYGGSIENRARFTLEVVDAVVDAIGPEKVGLRLSPYGTFNSMSGGAETGIVAQYAYVLGELERRAKAGKRLAFVHLVEPRVTDPSLVEGEGEYSEGTNDFAYSIWKGPIIRAGNYALHPEVVREQVKDPRTLIGYGRFFISNPDLVYRLEEGLPLNKYDRSTFYTMSAEGYIDYPTYEEAVDLGWNKN

SEQ ID NO: 21 - DNA, 1200 bp, synthetic construct
  misc_feature 1..1200: note = ERED chimera of Old Yellow Enzyme
  source 1..1200: mol_type = other DNA
atgtctttcgttaaggacttcaagccgcaggcactgcgcgacaccaacctgttcgaacctattaaaattgggaacacacagctggctcatcgcgcggtaatgcctccgctgacccgcatgcgcgctacccatccgggcaacattccgaacaaggagtgggctgcggtttactacggccagcgtgcacagcgtccggggacaatgattatcacggaggcgacgttcatcagcccgcaggcaggtgggtacgataacaagcctggtgtttggtcagacgaacaggttgccgaatggaagaacatcttcctggctattcatgactgtcagtcatttgcgtgggtgcaactgcaggtcctgggctgggccgcctttccggataacctggcgcgtgatgggttacgttacgattctgcctccgataatgtgtatatgaatgcggaacaggaggaaaaagcgaaaaaagctaacaatccgcaacatagcattactaaagacgaaattgcgcaatatgtcaaagaatatgttcaggcagctaagaactcgatcgctgcgggtgcggacggcgtggaaattcactcagccaacggttatctgttaaatcagttcctggatccgcacagcaacaaccgcaccgatgagtatgggggctcaattgaaaatcgtgcacgttttactctggaagtcgttgacgcggtggttgatgccatcggcccagaaaaagtgggtttacgtctgagtccgtacggcgttttcaactctatgtcgggcggcgcggaaacgggcattgttgctcagtatgcctatgtcctgggtgagctggagcgtcgcgccaaggcggggaaacgcctggcgtttgttcatttagtcgaaccacgcgtgacagacccttctctggttgagggggagggcgaatactcagagggcaccaacgattttgcttattccatttggaaaggtccgattatccgtgccggcaactacgcactacatcctgaagtagtgcgcgaacaagttaaggaccctcgcaccctgatcggctacggccgcttctttatttcaaatccagacctggtttaccgcttagaagaaggtctgccactgaacaagtatgaccgttctacgttctacaccatgagcgcggagggttacaccgactacccgacctacgaagaagccgtagatctgggctggaacaaaaac

SEQ ID NO: 22 - protein, 400 aa, synthetic construct
  REGION 1..400: note = ERED chimera of Old Yellow Enzyme
MSFVKDFKPQALRDTNLFEPIKIGNTQLAHRAVMPPLTRMRATHPGNIPNKEWAAVYYGQRAQRPGTMIITEATFISPQAGGYDNKPGVWSDEQVAEWKNIFLAIHDCQSFAWVQLQVLGWAAFPDNLARDGLRYDSASDNVYMNAEQEEKAKKANNPQHSITKDEIAQYVKEYVQAAKNSIAAGADGVEIHSANGYLLNQFLDPHSNNRTDEYGGSIENRARFTLEVVDAVVDAIGPEKVGLRLSPYGVFNSMSGGAETGIVAQYAYVLGELERRAKAGKRLAFVHLVEPRVTDPSLVEGEGEYSEGTNDFAYSIWKGPIIRAGNYALHPEVVREQVKDPRTLIGYGRFFISNPDLVYRLEEGLPLNKYDRSTFYTMSAEGYTDYPTYEEAVDLGWNKN

SEQ ID NO: 23 - DNA, 1200 bp, synthetic construct
  misc_feature 1..1200: note = ERED chimera of Old Yellow Enzyme
  source 1..1200: mol_type = other DNA
atgtctttcgttaaggacttcaagccgcaggcactgcgcgacaccaacctgttcgaacctattaaaattgggaacacacagctggctcatcgcgcggtaatgcctccgctgacccgcatgcgcgctacccatccgggcaacattccgaacaaggagtgggctgcggtttactacggccagcgtgcacagcgtccggggacaatgattatcacggaggcgacgttcatcagcccgcaggcaggtgggtacgataacaagcctggtgtttggtcagacgaacaggttgccgaatggaagaacatcttcctggctattcatgactgtcagtcatttgcgtgggtgcaactgcaggtcctgggctgggccgcctttccggataacctggcgcgtgatgggttacgttacgattctgcctccgataatgtgtatatgaatgcggaacaggaggaaaaagcgaaaaaagctaacaatccgcaacatagcattactaaagacgaaattaaacaatatgtcaaagaatatgttcaggcagctaagaactcgatcggggcgggtgcggacggcgtggaaattcactcagccaacggttatctgttaaatcagttcctggatccgcacagcaacaaccgcaccgatgagtatgggggctcaattgaaaatcgtgcacgttttactctggaagtcgttgacgcggtggttgatgccatcggcccagaaaaagtgggtttacgtctgagtccgtacggcgttttcaactctatgtcgggcggcgcggaaacgggcattgttgctcagtatgcctatgtcctgggtgagctggagcgtcgcgccaaggcggggaaacgcctggcgtttgttcatttagtcgaaccacgcgtgacagacccttctctggttgagggggagggcgaatactcagagggcaccaacgattttgcttattccatttggaaaggtccgattatccgtgccggcaactacgcactacatcctgaagtagtgcgcgaacaagttaaggaccctcgcaccctgatcggctacggccgcttctttatttcaaatccagacctggtttaccgcttagaagaaggtctgccactgaacaagtatgaccgttctacgttctacaccatgagcgcggagggttacaccgactacccgacctacgaagaagccgtagatctgggctggaacaaaaac

SEQ ID NO: 24 - protein, 400 aa, synthetic construct
  REGION 1..400: note = ERED chimera of Old Yellow Enzyme
MSFVKDFKPQALRDTNLFEPIKIGNTQLAHRAVMPPLTRMRATHPGNIPNKEWAAVYYGQRAQRPGTMIITEATFISPQAGGYDNKPGVWSDEQVAEWKNIFLAIHDCQSFAWVQLQVLGWAAFPDNLARDGLRYDSASDNVYMNAEQEEKAKKANNPQHSITKDEIKQYVKEYVQAAKNSIGAGADGVEIHSANGYLLNQFLDPHSNNRTDEYGGSIENRARFTLEVVDAVVDAIGPEKVGLRLSPYGVFNSMSGGAETGIVAQYAYVLGELERRAKAGKRLAFVHLVEPRVTDPSLVEGEGEYSEGTNDFAYSIWKGPIIRAGNYALHPEVVREQVKDPRTLIGYGRFFISNPDLVYRLEEGLPLNKYDRSTFYTMSAEGYTDYPTYEEAVDLGWNKN

SEQ ID NO: 25 - DNA, 1200 bp, synthetic construct
  misc_feature 1..1200: note = ERED chimera of Old Yellow Enzyme
  source 1..1200: mol_type = other DNA
atgtctttcgttaaggacttcaagccgcaggcactgggtgacaccaacctgttcgaacctattaaaattgggaacacacagctggctcatcgcgcggtaatgcctccgctgacccgcatgcgcgctacccatccgggcaacattccgaacaaggagtgggctgcggtttactacggccagcgtgcacagcgtccggggacaatgattatcacggaggcgacgttcatcagcccgcaggcaggtgggtacgataacaagcctggtgtttggtcagacgaacaggttgccgaatggaagaacatcttcctggctattcatgactgtcagtcatttgcgtgggtgcaactgcaggtcctgggctgggccgcctttccggataacctggcgcgtgatgggttacgttacgattctgcctccgataatgtgtatatgaatgcggaacaggaggaaaaagcgaaaaaagctaacaatccgcaacatagcattactaaagacgaaattaaacaatatgtcaaagaatatgttcaggcagctaagaactcgatcgctgcgggtgcggacggcgtggaaattcactcagccaacggttatctgttaaatcagttcctggatccgcacagcaacaaccgcaccgatgagtatgggggctcaattgaaaatcgtgcacgttttactctggaagtcgttgacgcggtggttgatgccatcggcccagaaaaagtgggtttacgtctgagtccgtacggcgttttcaactctatgtcgggcggcgcggaaacgggcattgttgctcagtatgcctatgtcctgggtgagctggagcgtcgcgccaaggcggggaaacgcctggcgtttgttcatttagtcgaaccacgcgtgacagacccttctctggttgagggggagggcgaatactcagagggcaccaacgattttgcttattccatttggaaaggtccgattatccgtgccggcaactacgcactacatcctgaagtagtgcgcgaacaagttaaggaccctcgcaccctgatcggctacggccgcttctttatttcaaatccagacctggtttaccgcttagaagaaggtctgccactgaacaagtatgaccgttctacgttctacaccatgagcgcggagggttacaccgactacccgacctacgaagaagccgtagatctgggctggaacaaaaac

SEQ ID NO: 26 - protein, 400 aa, synthetic construct
  REGION 1..400: note = ERED chimera of Old Yellow Enzyme
MSFVKDFKPQALGDTNLFEPIKIGNTQLAHRAVMPPLTRMRATHPGNIPNKEWAAVYYGQRAQRPGTMIITEATFISPQAGGYDNKPGVWSDEQVAEWKNIFLAIHDCQSFAWVQLQVLGWAAFPDNLARDGLRYDSASDNVYMNAEQEEKAKKANNPQHSITKDEIKQYVKEYVQAAKNSIAAGADGVEIHSANGYLLNQFLDPHSNNRTDEYGGSIENRARFTLEVVDAVVDAIGPEKVGLRLSPYGVFNSMSGGAETGIVAQYAYVLGELERRAKAGKRLAFVHLVEPRVTDPSLVEGEGEYSEGTNDFAYSIWKGPIIRAGNYALHPEVVREQVKDPRTLIGYGRFFISNPDLVYRLEEGLPLNKYDRSTFYTMSAEGYTDYPTYEEAVDLGWNKN

SEQ ID NO: 27 - DNA, 1200 bp, synthetic construct
  misc_feature 1..1200: note = ERED chimera of Old Yellow Enzyme
  source 1..1200: mol_type = other DNA
atgtctttcgttaaggacttcaagccgcaggcactgcgcgacaccaacctgttcgaacctattaaaattgggaacacacagctggctcatcgcgcggtaatgcctccgctgacccgcatgcgcgctacccatccgggcaacattccgaacaaggagtgggctgcggtttactacggccagcgtgcacagcgtccggggacaatgattatcacggaggcgacgttcatcagcccgcaggcaggtgggtacgataacaagcctggtgtttggtcagacgaacaggttgccgaatggaagaacatcttctcggctattcatgactgtcagtcatttgcgtgggtgcaactgcaggtcctgggctgggccgcctttccggataacctggcgcgtgatgggttacgttacgattctgcctccgataatgtgtatatgaatgcggaacaggaggaaaaagcgaaaaaagctaacaatccgcaacatagcattactaaagacgaaattaaacaatatgtcaaagaatatgttcaggcagctaagaactcgatcgctgcgggtgcggacggcgtggaaattcactcagccaacggttatctgttaaatcagttcctggatccgcacagcaacaaccgcaccgatgagtatgggggctcaattgaaaatcgtgcacgttttactctggaagtcgttgacgcggtggttgatgccatcggcccagaaaaagtgggtttacgtctgagtccgtacggcgttttcaactctatgtcgggcggcgcggaaacgggcattgttgctcagtatgcctatgtcctgggtgagctggagcgtcgcgccaaggcggggaaacgcctggcgtttgttcatttagtcgaaccacgcgtgacagacccttctctggttgagggggagggcgaatactcagagggcaccaacgattttgcttattccatttggaaaggtccgattatccgtgccggcaactacgcactacatcctgaagtagtgcgcgaacaagttaaggaccctcgcaccctgatcggctacggccgcttctttatttcaaatccagacctggtttaccgcttagaagaaggtctgccactgaacaagtatgaccgttctacgttctacaccatgagcgcggagggttacaccgactacccgacctacgaagaagccgtagatctgggctggaacaaaaac

SEQ ID NO: 28 - protein, 400 aa, synthetic construct
  REGION 1..400: note = ERED chimera of Old Yellow Enzyme
MSFVKDFKPQALRDTNLFEPIKIGNTQLAHRAVMPPLTRMRATHPGNIPNKEWAAVYYGQRAQRPGTMIITEATFISPQAGGYDNKPGVWSDEQVAEWKNIFSAIHDCQSFAWVQLQVLGWAAFPDNLARDGLRYDSASDNVYMNAEQEEKAKKANNPQHSITKDEIKQYVKEYVQAAKNSIAAGADGVEIHSANGYLLNQFLDPHSNNRTDEYGGSIENRARFTLEVVDAVVDAIGPEKVGLRLSPYGVFNSMSGGAETGIVAQYAYVLGELERRAKAGKRLAFVHLVEPRVTDPSLVEGEGEYSEGTNDFAYSIWKGPIIRAGNYALHPEVVREQVKDPRTLIGYGRFFISNPDLVYRLEEGLPLNKYDRSTFYTMSAEGYTDYPTYEEAVDLGWNKN

SEQ ID NO: 29 - DNA, 1200 bp, synthetic construct
  misc_feature 1..1200: note = ERED chimera of Old Yellow Enzyme
  source 1..1200: mol_type = other DNA
atgtctttcgttaaggacttcaagccgcaggcactgcgcgacaccaacctgttcgaacctattaaaattgggaacacacagctggctcatcgcgcggtaatgcctccgctgacccgcatgcgcgctacccatccgggcaacattccgaacaaggagtgggctgcggtttactacggccagcgtgcacagcgtccggggacaatgattatcacggaggcgacgttcatcagcccgcaggcaggtgggtacgataacaagcctggtgtttggtcagacgaacaggttgccgaatggaagaacatcttcctggctattcatgactgtcagtcatttgcgtgggtgcaactgcaggtcctgggctgggccgcctttccggataacctggcgcgtgatgggttacgttacgattctgcctccgataatgtgtatatgaatgcggaacaggaggaaaaagcgaaaaaagctaacaatccgcaacatagcattactaaagacgaaattaaacaatatgtcaaagaatatgttcaggcagctaagaactcgatcgaggcgggtgcggacggcgtggaaattcactcagccaacggttatctgttaaatcagttcctggatccgcacagcaacaaccgcaccgatgagtatgggggctcaattgaaaatcgtgcacgttttactctggaagtcgttgacgcggtggttgatgccatcggcccagaaaaagtgggtttacgtctgagtccgtacggcgttttcaactctatgtcgggcggcgcggaaacgggcattgttgctcagtatgcctatgtcctgggtgagctggagcgtcgcgccaaggcggggaaacgcctggcgtttgttcatttagtcgaaccacgcgtgacagacccttctctggttgagggggagggcgaatactcagagggcaccaacgattttgcttattccatttggaaaggtccgattatccgtgccggcaactacgcactacatcctgaagtagtgcgcgaacaagttaaggaccctcgcaccctgatcggctacggccgcttctttatttcaaatccagacctggtttaccgcttagaagaaggtctgccactgaacaagtatgaccgttctacgttctacaccatgagcgcggagggttacaccgactacccgacctacgaagaagccgtagatctgggctggaacaaaaac

SEQ ID NO: 30 - protein, 400 aa, synthetic construct
  REGION 1..400: note = ERED chimera of Old Yellow Enzyme
MSFVKDFKPQALRDTNLFEPIKIGNTQLAHRAVMPPLTRMRATHPGNIPNKEWAAVYYGQRAQRPGTMIITEATFISPQAGGYDNKPGVWSDEQVAEWKNIFLAIHDCQSFAWVQLQVLGWAAFPDNLARDGLRYDSASDNVYMNAEQEEKAKKANNPQHSITKDEIKQYVKEYVQAAKNSIEAGADGVEIHSANGYLLNQFLDPHSNNRTDEYGGSIENRARFTLEVVDAVVDAIGPEKVGLRLSPYGVFNSMSGGAETGIVAQYAYVLGELERRAKAGKRLAFVHLVEPRVTDPSLVEGEGEYSEGTNDFAYSIWKGPIIRAGNYALHPEVVREQVKDPRTLIGYGRFFISNPDLVYRLEEGLPLNKYDRSTFYTMSAEGYTDYPTYEEAVDLGWNKN

SEQ ID NO: 31 - DNA, 1200 bp, synthetic construct
  misc_feature 1..1200: note = ERED chimera of Old Yellow Enzyme
  source 1..1200: mol_type = other DNA
atgtctttcgttaaggacttcaagccgcaggcactgcgcgacaccaacctgttcgaacctattaaaattgggaacacacagctggctcatcgcgcggtaatgcctccgctgacccgcatgcgcgctacccatccgggcaacattccgaacaaggagtgggctgcggtttactacggccagcgtgcacagcgtccggggacaatgattatcacggaggcgacgttcatcagcccgcaggcaggtgggtacgataacaagcctggtgtttggtcagacgaacaggttgccgaatggaagaacatcttcctggctattcatgactgtcagtcatttgcgtgggtgcaactgcaggtcctgggctgggccgcctttccggataacctggcgcgtgatgggttacgttacgattctgcctccgataatgtgtatatgaatgcggaacaggaggaaaaagcgaaaaaagctaacaatccgcaacatagcattactaaagacgaaattaaacaatatgtcaaagaatatgttcaggcagctaagaactcgatcgctgcgggtgcggacggcgtggaaattcactcagccaacggttatctgttaaatcagttcctggatccgcacagcaacaaccgcaccgatgagtatgggggctcaattgaaaatcgtgcacgttttactctggaagtcgttgacgcggtggttgatgccatcggcccagaaaaagtgggtttacgtctgagtccgtacggcgttttcaactctatgtcgggcggcgcggaaacgggcattgttgctcagtatgcctatgtcctgggtgagctggagcgtcgcgccaaggcggggaaacgcctggcgtttgttcatttagtcgaaccacgcgtgacagacccttctctggttgagggggagggcgaatactcagagggcaccaacgattttgcttattccatttggaaaggtccgattatccgtgccggcaactacgcactacatcctgaagtagtgcgcgaacaagttaaggaccctcgcaccctgatcggctacggccgcttctttatttcaaatccagacctggtttaccgcttagaagaaggtctgccactgaacaagtatgaccgttctacgttctacaccatgagcgcggagggttacaccgactacccgacctacgaagaagccgtagatctgggctggaacgagaac

SEQ ID NO: 32 - protein, 400 aa, synthetic construct
  REGION 1..400: note = ERED chimera of Old Yellow Enzyme
MSFVKDFKPQALRDTNLFEPIKIGNTQLAHRAVMPPLTRMRATHPGNIPNKEWAAVYYGQRAQRPGTMIITEATFISPQAGGYDNKPGVWSDEQVAEWKNIFLAIHDCQSFAWVQLQVLGWAAFPDNLARDGLRYDSASDNVYMNAEQEEKAKKANNPQHSITKDEIKQYVKEYVQAAKNSIAAGADGVEIHSANGYLLNQFLDPHSNNRTDEYGGSIENRARFTLEVVDAVVDAIGPEKVGLRLSPYGVFNSMSGGAETGIVAQYAYVLGELERRAKAGKRLAFVHLVEPRVTDPSLVEGEGEYSEGTNDFAYSIWKGPIIRAGNYALHPEVVREQVKDPRTLIGYGRFFISNPDLVYRLEEGLPLNKYDRSTFYTMSAEGYTDYPTYEEAVDLGWNEN

SEQ ID NO: 33 - DNA, 1200 bp, synthetic construct
  misc_feature 1..1200: note = ERED chimera of Old Yellow Enzyme
  source 1..1200: mol_type = other DNA
atgtctttcgttaaggacttcaagccgcaggcactgcgcgacaccaacctgttcgaacctattaaaattgggaacacacagctggctcatcgcgcggtaatgcctccgctgacccgcatgcgcgctacccatccgggcaacattccgaacaaggagtgggctgcggtttactacggccagcgtgcacagcgtccggggacaatgattatcacggaggcgacgttcatcagcccgcaggcaggtgggtacgataacaagcctggtgtttggtcagacgaacaggttgccgaatggaagaacatcttcctggctattcatgactgtcagtcatttgcgtgggtgcaactgcaggtcctgggctgggccgcctttccggataacctggcgcgtgatgggttacgttacgattctgcctccgataatgtgtatatgaatgcggaacaggaggaaaaagcgaaaaaagctaacaatccgcaacatagcattactaaagacgaaattaaacaatatgtcaaagaatatgttcaggcagctaagaactcgatcgctgcgggtgcggacggcgtggaaattcactcagccaacggttatctgttaaatcagttcctggatccgcacagcaacaggcgcaccgatgagtatgggggctcaattgaaaatcgtgcacgttttactctggaagtcgttgacgcggtggttgatgccatcggcccagaaaaagtgggtttacgtctgagtccgtacggcgttttcaactctatgtcgggcggcgcggaaacgggcattgttgctcagtatgcctatgtcctgggtgagctggagcgtcgcgccaaggcggggaaacgcctggcgtttgttcatttagtcgaaccacgcgtgacagacccttctctggttgagggggagggcgaatactcagagggcaccaacgattttgcttattccatttggaaaggtccgattatccgtgccggcaactacgcactacatcctgaagtagtgcgcgaacaagttaaggaccctcgcaccctgatcggctacggccgcttctttatttcaaatccagacctggtttaccgcttagaagaaggtctgccactgaacaagtatgaccgttctacgttctacaccatgagcgcggagggttacaccgactacccgacctacgaagaagccgtagatctgggctggaacaaaaac

SEQ ID NO: 34 - protein, 400 aa, synthetic construct
  REGION 1..400: note = ERED chimera of Old Yellow Enzyme
MSFVKDFKPQALRDTNLFEPIKIGNTQLAHRAVMPPLTRMRATHPGNIPNKEWAAVYYGQRAQRPGTMIITEATFISPQAGGYDNKPGVWSDEQVAEWKNIFLAIHDCQSFAWVQLQVLGWAAFPDNLARDGLRYDSASDNVYMNAEQEEKAKKANNPQHSITKDEIKQYVKEYVQAAKNSIAAGADGVEIHSANGYLLNQFLDPHSNRRTDEYGGSIENRARFTLEVVDAVVDAIGPEKVGLRLSPYGVFNSMSGGAETGIVAQYAYVLGELERRAKAGKRLAFVHLVEPRVTDPSLVEGEGEYSEGTNDFAYSIWKGPIIRAGNYALHPEVVREQVKDPRTLIGYGRFFISNPDLVYRLEEGLPLNKYDRSTFYTMSAEGYTDYPTYEEAVDLGWNKN

SEQ ID NO: 35 - DNA, 1200 bp, synthetic construct
  misc_feature 1..1200: note = ERED chimera of Old Yellow Enzyme
  source 1..1200: mol_type = other DNA
atgtctttcgttaaggacttcaagccgcaggcactgcgcgacaccaacctgttcgaacctattaaaattgggaacacacagctggctcatcgcgcggtaatgcctccgctgacccgcatgcgcgctacccatccgggcaacattccgaacaaggagtgggctgcggtttactacggccagcgtgcacagcgtccggggacaatgattatcacggaggcgacgttcatcagcccgcaggcaggtgggtacgataacaagcctggtgtttggtcagacgaacaggttgccgaatggaagaacatcttcctggctattcatgactgtcagtcatttgcgtgggtgcaactgcaggtcctgggctgggccgcctttccggataacctggcgcgtgatgggttacgttacgattctgcctccgataatgtgtatatgaatgcggaacaggaggaaaaagcgaaaaaagctaacaatccgcaacatagcattactaaagacgaaattaaacaatatgtcaaagaatatgttcaggcagctaagaactcgatcgctgcgggtgcggacggcgtggaaattcactcagccaacggttatctgttaaatcagttcctggatccgcacagcaacaaccgcaccgatgagtatgggggctcaattgaaaatcgtgcacgttttactctggaagtcgttgacgcggtggttgatgccatcggcccagaaaaagtgggtttacgtctgagtccgtacggcgttttcaactctatgtcgggcggcgcggaaacgggcattgttgctcagtatgcctatgtcctgggtgagctggagcgtcgcgccaaggcggggaaacgcctggcgtttgttcatttagtcgaaccacgcgtgacagacccttctctggttgagggggagggcgaatactcagagggcaccaacgattttgcttattccatttggaaaggtccgattatccgtgccggcaactacgcactacatcctgaagtagtgcgcgaacaagttaaggaccctcgcaccctgatcggctacggccgcttctttatttcaaatccagacctggtttaccgcttagaagaaggtctgccactgaacaagtatgaccgttctacgttctacaccatgagcgcggagggttacaccgactacccgacctacgaagaagccgtagatctgggctggaacgttaac

SEQ ID NO: 36 - protein, 400 aa, synthetic construct
  REGION 1..400: note = ERED chimera of Old Yellow Enzyme
MSFVKDFKPQALRDTNLFEPIKIGNTQLAHRAVMPPLTRMRATHPGNIPNKEWAAVYYGQRAQRPGTMIITEATFISPQAGGYDNKPGVWSDEQVAEWKNIFLAIHDCQSFAWVQLQVLGWAAFPDNLARDGLRYDSASDNVYMNAEQEEKAKKANNPQHSITKDEIKQYVKEYVQAAKNSIAAGADGVEIHSANGYLLNQFLDPHSNNRTDEYGGSIENRARFTLEVVDAVVDAIGPEKVGLRLSPYGVFNSMSGGAETGIVAQYAYVLGELERRAKAGKRLAFVHLVEPRVTDPSLVEGEGEYSEGTNDFAYSIWKGPIIRAGNYALHPEVVREQVKDPRTLIGYGRFFISNPDLVYRLEEGLPLNKYDRSTFYTMSAEGYTDYPTYEEAVDLGWNVN

SEQ ID NO: 37 - DNA, 1200 bp, synthetic construct
  misc_feature 1..1200: note = ERED chimera of Old Yellow Enzyme
  source 1..1200: mol_type = other DNA
atgtctttcgtttcggacttcaagccgcaggcactgcgcgacaccaacctgttcgaacctattaaaattgggaacacacagctggctcatcgcgcggtaatgcctccgctgacccgcatgcgcgctacccatccgggcaacattccgaacaaggagtgggctgcggtttactacggccagcgtgcacagcgtccggggacaatgattatcacggaggcgacgttcatcagcccgcaggcaggtgggtacgataacaagcctggtgtttggtcagacgaacaggttgccgaatggaagaacatcttcctggctattcatgactgtcagtcatttgcgtgggtgcaactgcaggtcctgggctgggccgcctttccggataacctggcgcgtgatgggttacgttacgattctgcctccgataatgtgtatatgaatgcggaacaggaggaaaaagcgaaaaaagctaacaatccgcaacatagcattactaaagacgaaattaaacaatatgtcaaagaatatgttcaggcagctaagaactcgatcgctgcgggtgcggacggcgtggaaattcactcagccaacggttatctgttaaatcagttcctggatccgcacagcaacaaccgcaccgatgagtatgggggctcaattgaaaatcgtgcacgttttactctggaagtcgttgacgcggtggttgatgccatcggcccagaaaaagtgggtttacgtctgagtccgtacggcgttttcaactctatgtcgggcggcgcggaaacgggcattgttgctcagtatgcctatgtcctgggtgagctggagcgtcgcgccaaggcggggaaacgcctggcgtttgttcatttagtcgaaccacgcgtgacagacccttctctggttgagggggagggcgaatactcagagggcaccaacgattttgcttattccatttggaaaggtccgattatccgtgccggcaactacgcactacatcctgaagtagtgcgcgaacaagttaaggaccctcgcaccctgatcggctacggccgcttctttatttcaaatccagacctggtttaccgcttagaagaaggtctgccactgaacaagtatgaccgttctacgttctacaccatgagcgcggagggttacaccgactacccgacctacgaagaagccgtagatctgggctggaacaaaaac

SEQ ID NO: 38 - protein, 400 aa, synthetic construct
  REGION 1..400: note = ERED chimera of Old Yellow Enzyme
MSFVSDFKPQALRDTNLFEPIKIGNTQLAHRAVMPPLTRMRATHPGNIPNKEWAAVYYGQRAQRPGTMIITEATFISPQAGGYDNKPGVWSDEQVAEWKNIFLAIHDCQSFAWVQLQVLGWAAFPDNLARDGLRYDSASDNVYMNAEQEEKAKKANNPQHSITKDEIKQYVKEYVQAAKNSIAAGADGVEIHSANGYLLNQFLDPHSNNRTDEYGGSIENRARFTLEVVDAVVDAIGPEKVGLRLSPYGVFNSMSGGAETGIVAQYAYVLGELERRAKAGKRLAFVHLVEPRVTDPSLVEGEGEYSEGTNDFAYSIWKGPIIRAGNYALHPEVVREQVKDPRTLIGYGRFFISNPDLVYRLEEGLPLNKYDRSTFYTMSAEGYTDYPTYEEAVDLGWNKN

SEQ ID NO: 39 - DNA, 1200 bp, synthetic construct
  misc_feature 1..1200: note = ERED chimera of Old Yellow Enzyme
  source 1..1200: mol_type = other DNA
atgtctttcgttaaggacttcaagccgcaggcactgcgcgacaccaacctgttcgaacctattaaaattgggaacacacagctggctcatcgcgcggtaatgcctccgctgacccgcatgcgcgctacccatccgggcaacattccgaacaaggagtgggctgcggtttactacggccagcgtgcacagcgtccggggacaatgattatcacggaggcgacgttcatcagcccgcaggcaggtgggtacgataacaagcctggtgtttggtcagacgaacaggttgccgaatggaagaacatcttcctggctattcatgactgtcagtcatttgcgtgggtgcaactgcaggtcctgggctgggccgcctttccggataacctggcgcgtgatgggttacgttacgattctgcctccgataatgtgtatatgaatgcggaacaggaggaaaaagcgaaaaaagctaacaatccgcaacatagcattactaaagacgaaattaaacaatatgtcaaagaatatgttcaggcagctaagaactcgatcgctgcgggtgcggacggcgtggaaattcactcagccaacggttatctgttaaatcagttcctggatccgcacagcaacaaccgcaccgatgagtatgggggctcaattgaaaatcgtgcacgttttactctggaagtcgttgacgcggtggttgatgccatcggcccagaaaaagtgggtttacgtctgagtccgtacggcgttttcaactctatgtcgggcggcgcggaaacgggcattgttgctcagtatgcctatgtcctgggtgagctggagcgtcgcgccaaggcggggaaacgcctggcgtttgttcatttagtcgaaccacgcgtgacagacccttctctggttgagggggagggcgaatactcagagggcaccaacgattttgcttattccatttggaaaggtccgattatccgtgccggcaactacgcactacatcctgaagtagtgcgcgaacaagttaaggaccctcgcaccctgatcggctacggccgcttctttatttcaaatccagacctggtttaccgcttagaagaaggtctgccactgaacaagtatgaccgttctacgttctacaccatgagcgcggagggttacaccgactacccgacctacgaagaagccgtagatctgggctgggggaaaaac

SEQ ID NO: 40 - protein, 400 aa, synthetic construct
  REGION 1..400: note = ERED chimera of Old Yellow Enzyme
MSFVKDFKPQALRDTNLFEPIKIGNTQLAHRAVMPPLTRMRATHPGNIPNKEWAAVYYGQRAQRPGTMIITEATFISPQAGGYDNKPGVWSDEQVAEWKNIFLAIHDCQSFAWVQLQVLGWAAFPDNLARDGLRYDSASDNVYMNAEQEEKAKKANNPQHSITKDEIKQYVKEYVQAAKNSIAAGADGVEIHSANGYLLNQFLDPHSNNRTDEYGGSIENRARFTLEVVDAVVDAIGPEKVGLRLSPYGVFNSMSGGAETGIVAQYAYVLGELERRAKAGKRLAFVHLVEPRVTDPSLVEGEGEYSEGTNDFAYSIWKGPIIRAGNYALHPEVVREQVKDPRTLIGYGRFFISNPDLVYRLEEGLPLNKYDRSTFYTMSAEGYTDYPTYEEAVDLGWGKN

SEQ ID NO: 41 - DNA, 1200 bp, synthetic construct
  misc_feature 1..1200: note = ERED chimera of Old Yellow Enzyme
  source 1..1200: mol_type = other DNA
atgtctttcgttaaggacttcaagccgcaggcactgcgcgacaccaacctgttcgaacctattaaaattgggaacacacagctggctcatcgcgcggtaatgcctccgctgacccgcatgcgcgctacccatccgggcaacattccgaacaaggagtgggctgcggtttactacggccagcgtgcacagcgtccggggacaatgattatcacggaggcgacgttcatcagcccgcaggcaggtgggtacgataacaagcctggtgtttggtcagacgaacaggttgccgaatggaagaacatcttcctggctattcatgactgtgggtcatttgcgtgggtgcaactgcaggtcctgggctgggccgcctttccggataacctggcgcgtgatgggttacgttacgattctgcctccgataatgtgtatatgaatgcggaacaggaggaaaaagcgaaaaaagctaacaatccgcaacatagcattactaaagacgaaattaaacaatatgtcaaagaatatgttcaggcagctaagaactcgatcgctgcgggtgcggacggcgtggaaattcactcagccaacggttatctgttaaatcagttcctggatccgcacagcaacaaccgcaccgatgagtatgggggctcaattgaaaatcgtgcacgttttactctggaagtcgttgacgcggtggttgatgccatcggcccagaaaaagtgggtttacgtctgagtccgtacggcgttttcaactctatgtcgggcggcgcggaaacgggcattgttgctcagtatgcctatgtcctgggtgagctggagcgtcgcgccaaggcggggaaacgcctggcgtttgttcatttagtcgaaccacgcgtgacagacccttctctggttgagggggagggcgaatactcagagggcaccaacgattttgcttattccatttggaaaggtccgattatccgtgccggcaactacgcactacatcctgaagtagtgcgcgaacaagttaaggaccctcgcaccctgatcggctacggccgcttctttatttcaaatccagacctggtttaccgcttagaagaaggtctgccactgaacaagtatgaccgttctacgttctacaccatgagcgcggagggttacaccgactacccgacctacgaagaagccgtagatctgggctggaacaaaaac

SEQ ID NO: 42 - protein, 400 aa, synthetic construct
  REGION 1..400: note = ERED chimera of Old Yellow Enzyme
MSFVKDFKPQALRDTNLFEPIKIGNTQLAHRAVMPPLTRMRATHPGNIPNKEWAAVYYGQRAQRPGTMIITEATFISPQAGGYDNKPGVWSDEQVAEWKNIFLAIHDCGSFAWVQLQVLGWAAFPDNLARDGLRYDSASDNVYMNAEQEEKAKKANNPQHSITKDEIKQYVKEYVQAAKNSIAAGADGVEIHSANGYLLNQFLDPHSNNRTDEYGGSIENRARFTLEVVDAVVDAIGPEKVGLRLSPYGVFNSMSGGAETGIVAQYAYVLGELERRAKAGKRLAFVHLVEPRVTDPSLVEGEGEYSEGTNDFAYSIWKGPIIRAGNYALHPEVVREQVKDPRTLIGYGRFFISNPDLVYRLEEGLPLNKYDRSTFYTMSAEGYTDYPTYEEAVDLGWNKN

SEQ ID NO: 43 - DNA, 1200 bp, synthetic construct
  misc_feature 1..1200: note = ERED chimera of Old Yellow Enzyme
  source 1..1200: mol_type = other DNA
atgtctttcgttaaggacttcaagccgcaggcactgcgcgacaccaacctgttcgaacctattaaaattgggaacacacagctggctcatcgcgcggtaatgcctccgctgacccgcatgcgcgctacccatccgggcaacattccgaacaaggagtgggctgcggtttactacggccagcgtgcacagcgtccggggacaatgattatcacggaggcgacgttcatcagcccgcaggcaggtgggtacgataacaagcctggtgtttggtcagacgaacaggttgccgaatggaagaacatcttcagggctattcatgactgtcagtcatttgcgtgggtgcaactgcaggtcctgggctgggccgcctttccggataacctggcgcgtgatgggttacgttacgattctgcctccgataatgtgtatatgaatgcggaacaggaggaaaaagcgaaaggggctaacaatccgcaacatagcattactaaagacgaaattaaacaatatgtcaaagaatatgttcaggcagctaagaactcgatcgctgcgggtgcggacggcgtggaaattcactcagccaacggttatctgttaaatcagttcctggatccgcacagcaacaaccgcaccgatgagtatgggggctcaattgaaaatcgtgcacgttttactctggaagtcgttgacgcggtggttgatgccatcggcccagaaaaagtgggtttacgtctgagtccgtacggcgttttcaactctatgtcgggcggcgcggaaacgggcattgttgctcagtatgcctatgtcctgggtgagctggagcgtcgcgccaaggcggggaaacgcctggcgtttgttcatttagtcgaaccacgcgtgacagacccttctctggttgagggggagggcgaatactcagagggcaccaacgattttgcttattccatttggaaaggtccgattatccgtgccggcaactacgcactacatcctgaagtagtgcgcgaacaagttaaggaccctcgcaccctgatcggctacggccgcttctttatttcaaatccagacctggtttaccgcttagaagaaggtctgccactgaacaagtatgaccgttctacgttctacaccatgagcgcggagggttacaccgactacccgacctacgaagaagccgtagatctgggctggaacaaaaac

SEQ ID NO: 44 - protein, 400 aa, synthetic construct
  REGION 1..400: note = ERED chimera of Old Yellow Enzyme
MSFVKDFKPQALRDTNLFEPIKIGNTQLAHRAVMPPLTRMRATHPGNIPNKEWAAVYYGQRAQRPGTMIITEATFISPQAGGYDNKPGVWSDEQVAEWKNIFRAIHDCQSFAWVQLQVLGWAAFPDNLARDGLRYDSASDNVYMNAEQEEKAKGANNPQHSITKDEIKQYVKEYVQAAKNSIAAGADGVEIHSANGYLLNQFLDPHSNNRTDEYGGSIENRARFTLEVVDAVVDAIGPEKVGLRLSPYGVFNSMSGGAETGIVAQYAYVLGELERRAKAGKRLAFVHLVEPRVTDPSLVEGEGEYSEGTNDFAYSIWKGPIIRAGNYALHPEVVREQVKDPRTLIGYGRFFISNPDLVYRLEEGLPLNKYDRSTFYTMSAEGYTDYPTYEEAVDLGWNKN

SEQ ID NO: 45 - DNA, 1200 bp, synthetic construct
  misc_feature 1..1200: note = ERED chimera of Old Yellow Enzyme
  source 1..1200: mol_type = other DNA
atgtctttcgttaaggacttcaagccgcaggcactgcgcgacaccaacctgttcgaacctattaaaattgggaacacacagctggctcatcgcgcggtaatgcctccgctgacccgcatgcgcgctacccatccgggcaacattccgaacaaggagtgggctgcggtttactacggccagcgtgcacagcgtccggggacaatgattatcacggaggcgacgttcatcagcccgcaggcaggtgggtacgataacaagcctggtgtttggtcagacgaacaggttgccgaatggaagaacatcttcctggctattcatgactgtcagtcatttgcgtgggtgcaactgcaggtcctgggctgggccgcctttccggataacctggcgcgtgatgggttacgttacgattctgcctccgataatgtgtatatgaatgcggaacaggaggaaaaagcgaaaaaagctaacaatccgcaacatagcattactaaagacgaaattaaacaatatgtcaaagaatatgttcaggcagctaagaactcgatcgctgcgggtgcggacggcgtggaaattcactcagccaacggttatctgttaaatcagttcctggatccgcacagcaacaaccgcaccgatgagtatgggggctcaattgaaaatcgtgcacgttttactctggaagtcgttgacgcggtggttgatgccatcggcccagaaaaagtgggtttacgtctgagtccgtacggcgttttcaactctatgtcgggcggcgcggaaacgggcattgttgctcagtatgcctatgtcctgggtgagctggagcgtcgcgccaaggcggggaaacgcctggcgtttgttcatttagtcgaaccacgcgtgacagacccttctctggttgagggggagggcgaatactcagagggcaccaacgattttgcttattccatttggaaaggtccgattatccgtgccggcaactacgcactacatcctgaagtagtgcgcgaacaagttaaggaccctcgcaccctgatcggctacggccgcttctttatttcaaatccagacctggtttaccgcttagaagaaggtctgccactgaacaagtatgaccgttctacgttctacaccatgagcgcggagggttacaccgactacccgacctacgaagaagccgtagatctgggctggaacggtaac

SEQ ID NO: 46 - protein, 400 aa, synthetic construct
  REGION 1..400: note = ERED chimera of Old Yellow Enzyme
MSFVKDFKPQALRDTNLFEPIKIGNTQLAHRAVMPPLTRMRATHPGNIPNKEWAAVYYGQRAQRPGTMIITEATFISPQAGGYDNKPGVWSDEQVAEWKNIFLAIHDCQSFAWVQLQVLGWAAFPDNLARDGLRYDSASDNVYMNAEQEEKAKKANNPQHSITKDEIKQYVKEYVQAAKNSIAAGADGVEIHSANGYLLNQFLDPHSNNRTDEYGGSIENRARFTLEVVDAVVDAIGPEKVGLRLSPYGVFNSMSGGAETGIVAQYAYVLGELERRAKAGKRLAFVHLVEPRVTDPSLVEGEGEYSEGTNDFAYSIWKGPIIRAGNYALHPEVVREQVKDPRTLIGYGRFFISNPDLVYRLEEGLPLNKYDRSTFYTMSAEGYTDYPTYEEAVDLGWNGN

SEQ ID NO: 47 - DNA, 1200 bp, synthetic construct
  misc_feature 1..1200: note = ERED chimera of Old Yellow Enzyme
  source 1..1200: mol_type = other DNA
atgtctttcgttaaggacttcaagccgcaggcactgcgcgacaccaacctgttcgaacctattaaaattgggaacacacagctggctcatcgcgcggtaatgcctccgctgacccgcatgcgcgctacccatccgggcaacattccgaacaaggagtgggctgcggtttactacggccagcgtgcacagcgtccggggacaatgattatcacggaggcgacgttcatcagcccgcaggcaggtgggtacgataacaagcctggtgtttggtcagacgaacaggttgccgaatggaagaacatcttcggggctattcatgactgtcagtcatttgcgtgggtgcaactgcaggtcctgggctgggccgcctttccggataacctggcgcgtgatgggttacgttacgattctgcctccgataatgtgtatatgaatgcggaacaggaggaaaaagcgaaaaaagctaacaatccgcaacatagcattactaaagacgaaattaaacaatatgtcaaagaatatgttcaggcagctaagaactcgatcgctgcgggtgcggacggcgtggaaattcactcagccaacggttatctgttaaatcagttcctggatccgcacagcaacaaccgcaccgatgagtatgggggctcaattgaaaatcgtgcacgttttactctggaagtcgttgacgcggtggttgatgccatcggcccagaaaaagtgggtttacgtctgagtccgtacggcgttttcaactctatgtcgggcggcgcggaaacgggcattgttgctcagtatgcctatgtcctgggtgagctggagcgtcgcgccaaggcggggaaacgcctggcgtttgttcatttagtcgaaccacgcgtgacagacccttctctggttgagggggagggcgaatactcagagggcaccaacgattttgcttattccatttggaaaggtccgattatccgtgccggcaactacgcactacatcctgaagtagtgcgcgaacaagttaaggaccctcgcaccctgatcggctacggccgcttctttatttcaaatccagacctggtttaccgcttagaagaaggtctgccactgaacaagtatgaccgttctacgttctacaccatgagcgcggagggttacaccgactacccgacctacgaagaagccgtagatctgggctggaacaaaaac

SEQ ID NO: 48 - protein, 400 aa, synthetic construct
  REGION 1..400: note = ERED chimera of Old Yellow Enzyme
MSFVKDFKPQALRDTNLFEPIKIGNTQLAHRAVMPPLTRMRATHPGNIPNKEWAAVYYGQRAQRPGTMIITEATFISPQAGGYDNKPGVWSDEQVAEWKNIFGAIHDCQSFAWVQLQVLGWAAFPDNLARDGLRYDSASDNVYMNAEQEEKAKKANNPQHSITKDEIKQYVKEYVQAAKNSIAAGADGVEIHSANGYLLNQFLDPHSNNRTDEYGGSIENRARFTLEVVDAVVDAIGPEKVGLRLSPYGVFNSMSGGAETGIVAQYAYVLGELERRAKAGKRLAFVHLVEPRVTDPSLVEGEGEYSEGTNDFAYSIWKGPIIRAGNYALHPEVVREQVKDPRTLIGYGRFFISNPDLVYRLEEGLPLNKYDRSTFYTMSAEGYTDYPTYEEAVDLGWNKN

SEQ ID NO: 49 - DNA, 1200 bp, synthetic construct
  misc_feature 1..1200: note = ERED chimera of Old Yellow Enzyme
  source 1..1200: mol_type = other DNA
atgtctttcgttaaggacttcaagccgcaggcactgcgcgacaccaacctgttcgaacctattaaaattgggaacacacagctggctcatcgcgcggtaatgcctccgctgacccgcatgcgcgctacccatccgggcaacattccgaacaaggagtgggctgcggtttactacggccagcgtgcacagcgtccggggacaatgattatcacggaggcgacgttcatcagcccgcaggcaggtgggtacgataacaagcctggtgtttggtcagacgaacaggttgccgaatggaggaacatcttcctggctattcatgactgtcagtcatttgcgtgggtgcaactgcaggtcctgggctgggccgcctttccggataacctggcgcgtgatgggttacgttacgattctgcctccgataatgtgtatatgaatgcggaacaggaggaaaaagcgaaaaaagctaacaatccgcaacatagcattactaaagacgaaattaaacaatatgtcaaagaatatgttcaggcagctaagaactcgatcgctgcgggtgcggacggcgtggaaattcactcagccaacggttatctgttaaatcagttcctggatccgcacagcaacaaccgcaccgatgagtatgggggctcaattgaaaatcgtgcacgttttactctggaagtcgttgacgcggtggttgatgccatcggcccagaaaaagtgggtttacgtctgagtccgtacggcgttttcaactctatgtcgggcggcgcggaaacgggcattgttgctcagtatgcctatgtcctgggtgagctggagcgtcgcgccaaggcggggaaacgcctggcgtttgttcatttagtcgaaccacgcgtgacagacccttctctggttgagggggagggcgaatactcagagggcaccaacgattttgcttattccatttggaaaggtccgattatccgtgccggcaactacgcactacatcctgaagtagtgcgcgaacaagttaaggaccctcgcaccctgatcggctacggccgcttctttatttcaaatccagacctggtttaccgcttagaagaaggtctgccactgaacaagtatgaccgttctacgttctacaccatgagcgcggagggttacaccgactacccgacctacgaagaagccgtagatctaggctggaacaaaaac

SEQ ID NO: 50 - protein, 400 aa, synthetic construct
  REGION 1..400: note = ERED chimera of Old Yellow Enzyme
MSFVKDFKPQALRDTNLFEPIKIGNTQLAHRAVMPPLTRMRATHPGNIPNKEWAAVYYGQRAQRPGTMIITEATFISPQAGGYDNKPGVWSDEQVAEWRNIFLAIHDCQSFAWVQLQVLGWAAFPDNLARDGLRYDSASDNVYMNAEQEEKAKKANNPQHSITKDEIKQYVKEYVQAAKNSIAAGADGVEIHSANGYLLNQFLDPHSNNRTDEYGGSIENRARFTLEVVDAVVDAIGPEKVGLRLSPYGVFNSMSGGAETGIVAQYAYVLGELERRAKAGKRLAFVHLVEPRVTDPSLVEGEGEYSEGTNDFAYSIWKGPIIRAGNYALHPEVVREQVKDPRTLIGYGRFFISNPDLVYRLEEGLPLNKYDRSTFYTMSAEGYTDYPTYEEAVDLGWNKN

SEQ ID NO: 51 - DNA, 1200 bp, synthetic construct
  misc_feature 1..1200: note = ERED chimera of Old Yellow Enzyme
  source 1..1200: mol_type = other DNA
atgtctttcgttcaggacttcaagccgcaggcactgcgcgacaccaacctgttcgaacctattaaaattgggaacacacagctggctcatcgcgcggtaatgcctccgctgacccgcatgcgcgctacccatccgggcaacattccgaacaaggagtgggctgcggtttactacggccagcgtgcacagcgtccggggacaatgattatcacggaggcgacgttcatcagcccgcaggcaggtgggtacgataacaagcctggtgtttggtcagacgaacaggttgccgaatggaagaacatcttcctggctattcatgactgtcagtcatttgcgtgggtgcaactgcaggtcctgggctgggccgcctttccggataacctggcgcgtgatgggttacgttacgattctgcctccgataatgtgtatatgaatgcggaacaggaggaaaaagcgaaaaaagctaacaatccgcaacatagcattactaaagacgaaattaaacaatatgtcaaagaatatgttcaggcagctaagaactcgatcgctgcgggtgcggacggcgtggaaattcactcagccaacggttatctgttaaatcagttcctggatccgcacagcaacaaccgcaccgatgagtatgggggctcaattgaaaatcgtgcacgttttactctggaagtcgttgacgcggtggttgatgccatcggcccagaaaaagtgggtttacgtctgagtccgtacggcgttttcaactctatgtcgggcggcgcggaaacgggcattgttgctcagtatgcctatgtcctgggtgagctggagcgtcgcgccaaggcggggaaacgcctggcgtttgttcatttagtcgaaccacgcgtgacagacccttctctggttgagggggagggcgaatactcagagggcaccaacgattttgcttattccatttggaaaggtccgattatccgtgccggcaactacgcactacatcctgaagtagtgcgcgaacaagttaaggaccctcgcaccctgatcggctacggccgcttctttatttcaaatccagacctggtttaccgcttagaagaaggtctgccactgaacaagtatgaccgttctacgttctacaccatgagcgcggagggttacaccgactacccgacctacgaagaagccgtagatctgggctggaacaaaaac

SEQ ID NO: 52 - protein, 400 aa, synthetic construct
  REGION 1..400: note = ERED chimera of Old Yellow Enzyme
MSFVQDFKPQALRDTNLFEPIKIGNTQLAHRAVMPPLTRMRATHPGNIPNKEWAAVYYGQRAQRPGTMIITEATFISPQAGGYDNKPGVWSDEQVAEWKNIFLAIHDCQSFAWVQLQVLGWAAFPDNLARDGLRYDSASDNVYMNAEQEEKAKKANNPQHSITKDEIKQYVKEYVQAAKNSIAAGADGVEIHSANGYLLNQFLDPHSNNRTDEYGGSIENRARFTLEVVDAVVDAIGPEKVGLRLSPYGVFNSMSGGAETGIVAQYAYVLGELERRAKAGKRLAFVHLVEPRVTDPSLVEGEGEYSEGTNDFAYSIWKGPIIRAGNYALHPEVVREQVKDPRTLIGYGRFFISNPDLVYRLEEGLPLNKYDRSTFYTMSAEGYTDYPTYEEAVDLGWNKN

SEQ ID NO: 53 - DNA, 1200 bp, synthetic construct
  misc_feature 1..1200: note = ERED chimera of Old Yellow Enzyme
  source 1..1200: mol_type = other DNA
atgtctttcgttaaggacttcaagccgcaggcactgcgcgacaccaacctgttcgaacctattaaaattgggaacacacagctggctcatcgcgcggtaatgcctccgctgacccgcatgcgcgctacccatccgggcaacattccgaacaaggagtgggctgcggtttactacggccagcgtgcacagcgtccggggacaatgattatcacggaggcgacgttcatcagcccgcaggcaggtgggtacgataacaagcctggtgtttggtcagacgaacaggttgccgaatggaagaacatcttcctggctattcatgactgtcagtcatttgcgtgggtgcaactgcaggtcctgggctgggccgcctttccggataacctggcgcgtgatgggttacgttacgattctgcctccgataatgtgtatatgaatgcggaacaggaggaaaaagcgaaaaaagctaacaatccgcaacatagcattactaaagacgaaattaaacaatatgtcaaagaatatgttcaggcagctaagaactcgatcgctgcgggtgcggacggcgtggaaattcactcagccaacggttatctgttaaatcagttcctggatccgcacagcaacaaccgcaccgatgagtatgggggctcaattgaaaatcgtgcacgttttactctggaagtcgttgacgcggtggttgatgccatcggcccagaaaaagtgggtttacgtctgagtccgtacggcgttttcaactctatgtcgggcggcgcggaaacgggcattgttgctcagtatgcctatgtcctgggtgagctggagcgtcgcgccaaggcggggaaacgcctggcgtttgttcatttagtcgaaccacgcgtgacagacccttctctggttgagggggagggcgaatactcagagggcaccaacgattttgcttattccatttggaaaggtccgattatccgtgccggcaactacgcactacatcctgaagtagtgcgcgaacaagttaaggaccctcgcaccctgatcggctacggccgcttctttatttcaaatccagacctggtttaccgcttagaagaaggtctgccactgaacgagtatgaccgttctacgttctacaccatgagcgcggagggttacaccgactacccgacctacgaagaagccgtagatctgggctggaacaaaaac

SEQ ID NO: 54 - protein, 400 aa, synthetic construct
  REGION 1..400: note = ERED chimera of Old Yellow Enzyme
MSFVKDFKPQALRDTNLFEPIKIGNTQLAHRAVMPPLTRMRATHPGNIPNKEWAAVYYGQRAQRPGTMIITEATFISPQAGGYDNKPGVWSDEQVAEWKNIFLAIHDCQSFAWVQLQVLGWAAFPDNLARDGLRYDSASDNVYMNAEQEEKAKKANNPQHSITKDEIKQYVKEYVQAAKNSIAAGADGVEIHSANGYLLNQFLDPHSNNRTDEYGGSIENRARFTLEVVDAVVDAIGPEKVGLRLSPYGVFNSMSGGAETGIVAQYAYVLGELERRAKAGKRLAFVHLVEPRVTDPSLVEGEGEYSEGTNDFAYSIWKGPIIRAGNYALHPEVVREQVKDPRTLIGYGRFFISNPDLVYRLEEGLPLNEYDRSTFYTMSAEGYTDYPTYEEAVDLGWNKN

SEQ ID NO: 55 - DNA, 1200 bp, synthetic construct
  misc_feature 1..1200: note = ERED chimera of Old Yellow Enzyme
  source 1..1200: mol_type = other DNA
atgtctttcgttaaggacttcaagccgcaggcactgcgcgacaccaacctgttcgaacctattaaaattgggaacacacagctggcttatcgcgcggtaatgcctccgctgacccgcatgcgcgctacccatccgggcaacattccgaacaaggagtgggctgcggtttactacggccagcgtgcacagcgtccggggacaatgattatcacggaggcgacgttcatcagcccgcaggcaggtgggtacgataacaagcctggtgtttggtcagacgaacaggttgccgaatggaagaacatcttcctggctattcatgactgtcagtcatttgcgtgggtgcaactgcaggtcctgggctgggccgcctttccggataacctggcgcgtgatgggttacgttacgattctgcctccgataatgtgtatatgaatgcggaacaggaggaaaaagcgaaaaaagctaacaatccgcaacatagcattactaaagacgaaattaaacaatatgtcaaagaatatgttcaggcagctaagaactcgatcgctgcgggtgcggacggcgtggaaattcactcagccaacggttatctgttaaatcagttcctggatccgcacagcaacaaccgcaccgatgagtatgggggctcaattgaaaatcgtgcacgttttactctggaagtcgttgacgcggtggttgatgccatcggcccagaaaaagtgggtttacgtctgagtccgtacggcgttttcaactctatgtcgggcggcgcggaaacgggcattgttgctcagtatgcctatgtcctgggtgagctggagcgtcgcgccaaggcggggaaacgcctggcgtttgttcatttagtcgaaccacgcgtgacagacccttctctggttgagggggagggcgaatactcagagggcaccaacgattttgcttattccatttggaaaggtccgattatccgtgccggcaactacgcactacatcctgaagtagtgcgcgaacaagttaaggaccctcgcaccctgatcggctacggccgcttctttatttcaaatccagacctggtttaccgcttagaagaaggtctgccactgaacaagtatgaccgttctacgttctacaccatgagcgcggagggttacaccgactacccgacctacgaagaagccgtagatctgggctggaacaaaaac

SEQ ID NO: 56 - protein, 400 aa, synthetic construct
  REGION 1..400: note = ERED chimera of Old Yellow Enzyme
MSFVKDFKPQALRDTNLFEPIKIGNTQLAYRAVMPPLTRMRATHPGNIPNKEWAAVYYGQRAQRPGTMIITEATFISPQAGGYDNKPGVWSDEQVAEWKNIFLAIHDCQSFAWVQLQVLGWAAFPDNLARDGLRYDSASDNVYMNAEQEEKAKKANNPQHSITKDEIKQYVKEYVQAAKNSIAAGADGVEIHSANGYLLNQFLDPHSNNRTDEYGGSIENRARFTLEVVDAVVDAIGPEKVGLRLSPYGVFNSMSGGAETGIVAQYAYVLGELERRAKAGKRLAFVHLVEPRVTDPSLVEGEGEYSEGTNDFAYSIWKGPIIRAGNYALHPEVVREQVKDPRTLIGYGRFFISNPDLVYRLEEGLPLNKYDRSTFYTMSAEGYTDYPTYEEAVDLGWNKN

SEQ ID NO: 57 - DNA, 1200 bp, synthetic construct
  misc_feature 1..1200: note = ERED chimera of Old Yellow Enzyme
  source 1..1200: mol_type = other DNA
atgtctttcgttaaggacttcaagccgcaggcactgcgcgacaccaacctgttcgaacctattaaaattgggaacacacagctggctcatcgcgcggtaatgcctccgctgacccgcatgcgcgctacccatccgggcaacattccgaacaaggagtgggctgcggtttactacggccagcgtgcacagcgtccggggacaatgattatcacggaggcgacgttcatcagcccgcaggcaggtgggtacgataacaagcctggtgtttggtcagacgaacaggttgccgaatggaagaacatcttcctggctattcatgactgtcagtcatttgcgtgggtgcaactgcaggtcctgggctgggccgcctttccggataacctggcgcgtgatgggttacgttacgattctgcctccgataatgtgtatatgaatgcggaacaggaggaaaaagcgaaaaaagctaacaatccgcaacatagcattactaaagacgaaattaaacaatatgtcaaagaatatgttcaggcagctaagaactcgatcgctgcgggtgcggacggcgtggaaattcactcagccaacggttatctgttaaatcagttcctggatccgcacagcaacaaccgcaccgatgagtatgggggctcaattgaaaatcgtgcacgttttactctggaagtcgttgacgcggtggttgatgccatcggcccagaaaaagtgggtttacgtctgagtccgtacggcgttttcaactctatgtcgggcggcgcggaaacgggcattgttgctcagtatgcctatgtcctgggtgagctggagcgtcgcgccaaggcggggaaacgcctggcgtttgttcatttagtcgaaccacgcgtgacagacccttctctggttgagggggagggcgaatactcaggtggcaccaacgattttgcttattccatttggaaaggtccgattatccgtgccggcaactacgcactacatcctgaagtagtgcgcgaacaagttaaggaccctcgcaccctgatcggctacggccgcttctttatttcaaatccagacctggtttaccgcttagaagaaggtctgccactgaacaagtatgaccgttctacgttctacaccatgagcgcggagggttacaccgactacccgacctacgaagaagccgtagatctgggctggaacaaaaac

SEQ ID NO: 58 - protein, 400 aa, synthetic construct
  REGION 1..400: note = ERED chimera of Old Yellow Enzyme
MSFVKDFKPQALRDTNLFEPIKIGNTQLAHRAVMPPLTRMRATHPGNIPNKEWAAVYYGQRAQRPGTMIITEATFISPQAGGYDNKPGVWSDEQVAEWKNIFLAIHDCQSFAWVQLQVLGWAAFPDNLARDGLRYDSASDNVYMNAEQEEKAKKANNPQHSITKDEIKQYVKEYVQAAKNSIAAGADGVEIHSANGYLLNQFLDPHSNNRTDEYGGSIENRARFTLEVVDAVVDAIGPEKVGLRLSPYGVFNSMSGGAETGIVAQYAYVLGELERRAKAGKRLAFVHLVEPRVTDPSLVEGEGEYSGGTNDFAYSIWKGPIIRAGNYALHPEVVREQVKDPRTLIGYGRFFISNPDLVYRLEEGLPLNKYDRSTFYTMSAEGYTDYPTYEEAVDLGWNKN

SEQ ID NO: 59 - DNA, 1200 bp, synthetic construct
  misc_feature 1..1200: note = ERED chimera of Old Yellow Enzyme
  source 1..1200: mol_type = other DNA
atgtctttcgttaaggacttcaagccgcaggcactgcgcgacaccaacctgttcgaacctattaaaattgggaacacacagctggctcatcgcgcggtaatgcctccgctgacccgcatgcgcgctacccatccgggcaacattccgaacaaggagtgggctgcggtttactacggccagcgtgcacagcgtccggggacaatgattatcacggaggcgacgttcatcagcccgcaggcaggtgggtacgataacaagcctggtgtttggtcagacgaacaggttgccgaatggaagaggatcttcctggctattcatgactgtcagtcatttgcgtgggtgcaactgcaggtcctgggctgggccgcctttccggataacctggcgcgtgatgggttacgttacgattctgcctccgataatgtgtatatgaatgcggaacaggaggaaaaagcgaaaaaagctaacaatccgcaacatagcattactaaagacgaaattaaacaatatgtcaaagaatatgttcaggcagctaagaactcgatcgctgcgggtgcggacggcgtggaaattcactcagccaacggttatctgttaaatcagttcctggatccgcacagcaacaaccgcaccgatgagtatgggggctcaattgaaaatcgtgcacgttttactctggaagtcgttgacgcggtggttgatgccatcggcccagaaaaagtgggtttacgtctgagtccgtacggcgttttcaactctatgtcgggcggcgcggaaacgggcattgttgctcagtatgcctatgtcctgggtgagctggagcgtcgcgccaaggcggggaaacgcctggcgtttgttcatttagtcgaaccacgcgtgacagacccttctctggttgagggggagggcgaatactcagagggcaccaacgattttgcttattccatttggaaaggtccgattatccgtgccggcaactacgcactacatcctgaagtagtgcgcgaacaagttaaggaccctcgcaccctgatcggctacggccgcttctttatttcaaatccagacctggtttaccgcttagaagaaggtctgccactgaacaagtatgaccgttctacgttctacaccatgagcgcggagggttacaccgactacccgacctacgaagaagccgtagatctgggctggaacaaaaac

SEQ ID NO: 60 - protein, 400 aa, synthetic construct
  REGION 1..400: note = ERED chimera of Old Yellow Enzyme
MSFVKDFKPQALRDTNLFEPIKIGNTQLAHRAVMPPLTRMRATHPGNIPNKEWAAVYYGQRAQRPGTMIITEATFISPQAGGYDNKPGVWSDEQVAEWKRIFLAIHDCQSFAWVQLQVLGWAAFPDNLARDGLRYDSASDNVYMNAEQEEKAKKANNPQHSITKDEIKQYVKEYVQAAKNSIAAGADGVEIHSANGYLLNQFLDPHSNNRTDEYGGSIENRARFTLEVVDAVVDAIGPEKVGLRLSPYGVFNSMSGGAETGIVAQYAYVLGELERRAKAGKRLAFVHLVEPRVTDPSLVEGEGEYSEGTNDFAYSIWKGPIIRAGNYALHPEVVREQVKDPRTLIGYGRFFISNPDLVYRLEEGLPLNKYDRSTFYTMSAEGYTDYPTYEEAVDLGWNKN

SEQ ID NO: 61 - DNA, 1200 bp, synthetic construct
  misc_feature 1..1200: note = ERED chimera of Old Yellow Enzyme
  source 1..1200: mol_type = other DNA
atgtctttcgttaaggacttcaagccgcaggcactgcgcgacaccaacctgttcgaacctattaaaattgggaacacacagctggctcatcgcgcggtaatgcctccgctgacccgcatgcgcgctacccatccgggcaacattccgaacaaggagtgggctgcggtttactacggccagcgtgcacagcgtccggggacaatgattatcacggaggcgacgttcatcagcccgcaggcaggtgggtacgataacaagcctggtgtttggtcagacgaacaggttgccgaatggaagaacatcttcctggctattcatgagtgtcagtcatttgcgtgggtgcaactgcaggtcctgggctgggccgcctttccggataacctggcgcgtgatgggttacgttacgattctgcctccgataatgtgtatatgaatgcggaacaggaggaaaaagcgaaaaaagctaacaatccgcaacatagcattactaaagacgaaattaaacaatatgtcaaagaatatgttcaggcagctaagaactcgatcgctgcgggtgcggacggcgtggaaattcactcagccaacggttatctgttaaatcagttcctggatccgcacagcaacaaccgcaccgatgagtatgggggctcaattgaaaatcgtgcacgttttactctggaagtcgttgacgcggtggttgatgccatcggcccagaaaaagtgggtttacgtctgagtccgtacggcgttttcaactctatgtcgggcggcgcggaaacgggcattgttgctcagtatgcctatgtcctgggtgagctggagcgtcgcgccaaggcggggaaacgcctggcgtttgttcatttagtcgaaccacgcgtgacagacccttctctggttgagggggagggcgaatactcagagggcaccaacgattttgcttattccatttggaaaggtccgattatccgtgccggcaactacgcactacatcctgaagtagtgcgcgaacaagttaaggaccctcgcaccctgatcggctacggccgcttctttatttcaaatccagacctggtttaccgcttagaagaaggtctgccactgaacaagtatgaccgttctacgttctacaccatgagcgcggagggttacaccgactacccgacctacgaagaagccgtagatctgggctggaacaaaaac

SEQ ID NO: 62 - protein, 400 aa, synthetic construct
  REGION 1..400: note = ERED chimera of Old Yellow Enzyme
MSFVKDFKPQALRDTNLFEPIKIGNTQLAHRAVMPPLTRMRATHPGNIPNKEWAAVYYGQRAQRPGTMIITEATFISPQAGGYDNKPGVWSDEQVAEWKNIFLAIHECQSFAWVQLQVLGWAAFPDNLARDGLRYDSASDNVYMNAEQEEKAKKANNPQHSITKDEIKQYVKEYVQAAKNSIAAGADGVEIHSANGYLLNQFLDPHSNNRTDEYGGSIENRARFTLEVVDAVVDAIGPEKVGLRLSPYGVFNSMSGGAETGIVAQYAYVLGELERRAKAGKRLAFVHLVEPRVTDPSLVEGEGEYSEGTNDFAYSIWKGPIIRAGNYALHPEVVREQVKDPRTLIGYGRFFISNPDLVYRLEEGLPLNKYDRSTFYTMSAEGYTDYPTYEEAVDLGWNKN

SEQ ID NO: 63 - DNA, 1200 bp, synthetic construct
  misc_feature 1..1200: note = ERED chimera of Old Yellow Enzyme
  source 1..1200: mol_type = other DNA
atgtctttcgttaaggacttcaagccgcaggcactgcgcgacaccaacctgttcgaacctattaaaattgggaacacacagctggctcatcgcgcggtaatgcctccgctgacccgcatgcgcgctacccatccgggcaacattccgaacaaggagtgggctgcggtttactacggccagcgtgcacagcgtccggggacaatgattatcacggaggcgacgttcatcagcccgcaggcaggtgggtacgataacaagcctggtgtttggtcagacgaacaggttgccgaatggaagaacatcttcctggctattcatgactgtcagtcatttgcgtgggtgcaactgcaggtcctgggctgggccgcctttccggataacctggcgcgtgatgggttacgttacgattctgcctccgataatgtgtatatgaatgcggaacaggaggaaaaagcgaaaaaagctaacaatccgcaacatagcattactaaagacgaaattaaacaatatgtcaaagaatatgttcaggcagctaagaactcgatcgctgcgggtgcggacggcgtggaaattcactcagccaacggttatctgttaaatcagttcctggatccgcacagcaacaaccgcaccgatgagtatgggggctcaattgaaaatcgtgcacgttttactctggaagtcgttgacgcggtggttgatgccatcggcccagaaaaagtgggtttacgtctgagtccgtacggcgttttcaactctatgtcgggcggcgcggaaacgggcattgttgctcagtatgcctatgtcctgggtgagctggagcgtcgcgccaaggcggggaaacgcctggcgtttgttcatttagtcgaaccacgcgtgacagacccttctctggttgagggggagggcgaatacgtggagggcaccaacgattttgcttattccatttggaaaggtccgattatccgtgccggcaactacgcactacatcctgaagtagtgcgcgaacaagttaaggaccctcgcaccctgatcggctacggccgcttctttatttcaaatccagacctggtttaccgcttagaagaaggtctgccactgaacaagtatgaccgttctacgttctacaccatgagcgcggagggttacaccgactacccgacctacgaagaagccgtagatctgggctggaacaaaaac

SEQ ID NO: 64 - protein, 400 aa, synthetic construct
  REGION 1..400: note = ERED chimera of Old Yellow Enzyme
MSFVKDFKPQALRDTNLFEPIKIGNTQLAHRAVMPPLTRMRATHPGNIPNKEWAAVYYGQRAQRPGTMIITEATFISPQAGGYDNKPGVWSDEQVAEWKNIFLAIHDCQSFAWVQLQVLGWAAFPDNLARDGLRYDSASDNVYMNAEQEEKAKKANNPQHSITKDEIKQYVKEYVQAAKNSIAAGADGVEIHSANGYLLNQFLDPHSNNRTDEYGGSIENRARFTLEVVDAVVDAIGPEKVGLRLSPYGVFNSMSGGAETGIVAQYAYVLGELERRAKAGKRLAFVHLVEPRVTDPSLVEGEGEYVEGTNDFAYSIWKGPIIRAGNYALHPEVVREQVKDPRTLIGYGRFFISNPDLVYRLEEGLPLNKYDRSTFYTMSAEGYTDYPTYEEAVDLGWNKN

SEQ ID NO: 65 - DNA, 1200 bp, synthetic construct
  misc_feature 1..1200: note = ERED chimera of Old Yellow Enzyme
  source 1..1200: mol_type = other DNA
atgtctttcgttaaggacttcaagccgcaggcactgcgcgacaccaacctgttcgaacctattaaaattgggaacacacagctggctcatcgcgcggtaatgcctccgctgacccgcatgcgcgctacccatccgggcaacattccgaacaaggagtgggctgcggtttactacggccagcgtgcacagcgtccggggacaatgattatcacggaggcgacgttcatcagcccgcaggcaggtgggtacgataacaagcctggtgtttggtcagacgaacaggttgccgaatggaagaacatcttcctggctattcatgactgtcagtcatttgcgtgggtgcaactgcaggtcctgggctgggccgcctttccggataacctggcgcgtgatgggttacgttacgattctgcctccgataatgtgtatatgaatgcggaacaggaggaaaaagcgaaaaaagctaacaatccgcaacatagcattactaaagacgaaattaaacaatatgtcaaagaatatgttcaggcagctaagaactcgatcgctgcgggtgcggacggcgtggaaattcactcagccaacggttatctgttaaatcagttcctggatccgcacagcaacaaccgcaccgatgagtatgggggctcaattgaaaatcgtgcacgttttactctggaagtcgttgacgcggtggttgatgccatcggcccagaaaaagtgggtttacgtctgagtccgtacggcgttttcaactctatgtcgggcggcgcggaaacgggcattgttgctcagtatgcctatgtcctgggtgagctggagcgtcgcgccaaggcggggaaacgcctggcgtttgttcatttagtcgaaccacgcgtgacagacccttctctggttgagggggagggcgaatactcagagggcaccaacgattttgcttattccatttggaaaggtccgattatccgtgccggcaactacgcactacatcctgaagtagtgcgcgaacaagttaaggacggtcgcaccctgatcggctacggccgcttctttatttcaaatccagacctggtttaccgcttagaagaaggtctgccactgaacaagtatgaccgttctacgttctacaccatgagcgcggagggttacaccgactacccgacctacgaagaagccgtagatctgggctggaacaaaaac

SEQ ID NO: 66 - protein, 400 aa, synthetic construct
  REGION 1..400: note = ERED chimera of Old Yellow Enzyme
MSFVKDFKPQALRDTNLFEPIKIGNTQLAHRAVMPPLTRMRATHPGNIPNKEWAAVYYGQRAQRPGTMIITEATFISPQAGGYDNKPGVWSDEQVAEWKNIFLAIHDCQSFAWVQLQVLGWAAFPDNLARDGLRYDSASDNVYMNAEQEEKAKKANNPQHSITKDEIKQYVKEYVQAAKNSIAAGADGVEIHSANGYLLNQFLDPHSNNRTDEYGGSIENRARFTLEVVDAVVDAIGPEKVGLRLSPYGVFNSMSGGAETGIVAQYAYVLGELERRAKAGKRLAFVHLVEPRVTDPSLVEGEGEYSEGTNDFAYSIWKGPIIRAGNYALHPEVVREQVKDGRTLIGYGRFFISNPDLVYRLEEGLPLNKYDRSTFYTMSAEGYTDYPTYEEAVDLGWNKN

SEQ ID NO: 67 - DNA, 1200 bp, synthetic construct
  misc_feature 1..1200: note = ERED chimera of Old Yellow Enzyme
  source 1..1200: mol_type = other DNA
atgtctttcgttaaggacttcaagccgcaggcactgcgcgacaccaacctgttcgaacctattaaaattgggaacacacagctggctcatcgcgcggtaatgcctccgctgacccgcatgcgcgctacccatccgggcaacattccgaacaaggagtgggctgcggtttactacggccagcgtgcacagcgtccggggacaatgattatcacggaggcgacgttcatcagcccgcaggcaggtgggtacgataacaagcctggtgtttggtcagacgaacaggttgccgaatggaagaacatcttcctggctattcatgactgtcagtcatttgcgtgggtgcaactgcaggtcctgggctgggccgcctttccggataacctggcgcgtgatgggttacgttacgattctgcctccgataatgtgtatatgaatgcggaacaggaggaaaaagcgaaaaaagctaacaatccgcaacatagcattactaaagacgaaattaaacaatatgtcaaagaatatgttcaggcagctaagaactcgatcgctgcgggtgcggacggcgtggaaattcactcagccaacggttatctgttaaatcagttcctggatccgcacagcaacaaccgcaccgatgagtatgggggctcaattgaaaatcgtgcacgttttactctggaagtcgttgacgcggtggttgatgccatcggcccagaaaaagtgggtttacgtctgagtccgtacggcgttttcaactctatgtcgggcggcgcggaaacgggcattgttgctcagtatgcctatgtcctgggtgagctggagcgtcgcgccaaggcggggaaacgcctggcgtttgttcatttagtcgaaccacgcgtgacagacccttctctggttgagggggagggcgaatactcagagggcaccaacgattttgcttattccatttggaaaggtccgattatccgtgccggcaactacgcactacatcctgaagtagtgcgcgaacaagttaaggaccctcgcaccctgatcggctacggccgcttctttatttcaaatccagacctggttcagcgcttagaagaaggtctgccactgaacaagtatgaccgttctacgttctacaccatgagcgcggagggttacaccgactacccgacctacgaagaagccgtagatctgggctggaacaaaaac

SEQ ID NO: 68 - protein, 400 aa, synthetic construct
  REGION 1..400: note = ERED chimera of Old Yellow Enzyme
MSFVKDFKPQALRDTNLFEPIKIGNTQLAHRAVMPPLTRMRATHPGNIPNKEWAAVYYGQRAQRPGTMIITEATFISPQAGGYDNKPGVWSDEQVAEWKNIFLAIHDCQSFAWVQLQVLGWAAFPDNLARDGLRYDSASDNVYMNAEQEEKAKKANNPQHSITKDEIKQYVKEYVQAAKNSIAAGADGVEIHSANGYLLNQFLDPHSNNRTDEYGGSIENRARFTLEVVDAVVDAIGPEKVGLRLSPYGVFNSMSGGAETGIVAQYAYVLGELERRAKAGKRLAFVHLVEPRVTDPSLVEGEGEYSEGTNDFAYSIWKGPIIRAGNYALHPEVVREQVKDPRTLIGYGRFFISNPDLVQRLEEGLPLNKYDRSTFYTMSAEGYTDYPTYEEAVDLGWNKN

SEQ ID NO: 69 - DNA, 1200 bp, synthetic construct
  misc_feature 1..1200: note = ERED chimera of Old Yellow Enzyme
  source 1..1200: mol_type = other DNA
atgtctttcgttaaggacttcaagccgcaggcactgcgcgacaccaacctgttcgaacctattaaaattgggaacacacagctggctcatcgcgcggtaatgcctccgctgacccgcatgcgcgctacccatccgggcaacattccgaacaaggagtgggctgcggtttactacggccagcgtgcacagcgtccggggacaatgattatcacggaggcgacgttcatcagcccgcaggcaggtgggtacgataacaagcctggtgtttggtcagacgaacaggttgccgaatggaagaacatcttcctggctattcatgactgtcagtcatttgcgtgggtgcaactgcaggtcctgggctgggccgcctttccggataacctggcgcgtgatgggttacgttacgattctgcctccgataatgtgtatatgaatgcggaacaggaggaaaaagcgaaaaaagctaacaatccgcaacatagcattactaaagacgaaattcagcaatatgtcaaagaatatgttcaggcagctaagaactcgatcgctgcgggtgcggacggcgtggaaattcactcagccaacggttatctgttaaatcagttcctggatccgcacagcaacaaccgcaccgatgagtatgggggctcaattgaaaatcgtgcacgttttactctggaagtcgttgacgcggtggttgatgccatcggcccagaaaaagtgggtttacgtctgagtccgtacggcgttttcaactctatgtcgggcggcgcggaaacgggcattgttgctcagtatgcctatgtcctgggtgagctggagcgtcgcgccaaggcggggaaacgcctggcgtttgttcatttagtcgaaccacgcgtgacagacccttctctggttgagggggagggcgaatactcagagggcaccaacgattttgcttattccatttggaaaggtccgattatccgtgccggcaactacgcactacatcctgaagtagtgcgcgaacaagttaaggaccctcgcaccctgatcggctacggccgcttctttatttcaaatccagacctggtttaccgcttagaagaaggtctgccactgaacaagtatgaccgttctacgttctacaccatgagcgcggagggttacaccgactacccgacctacgaagaagccgtagatctgggctggaacaaaaac

SEQ ID NO: 70 - protein, 400 aa, synthetic construct
  REGION 1..400: note = ERED chimera of Old Yellow Enzyme
MSFVKDFKPQALRDTNLFEPIKIGNTQLAHRAVMPPLTRMRATHPGNIPNKEWAAVYYGQRAQRPGTMIITEATFISPQAGGYDNKPGVWSDEQVAEWKNIFLAIHDCQSFAWVQLQVLGWAAFPDNLARDGLRYDSASDNVYMNAEQEEKAKKANNPQHSITKDEIQQYVKEYVQAAKNSIAAGADGVEIHSANGYLLNQFLDPHSNNRTDEYGGSIENRARFTLEVVDAVVDAIGPEKVGLRLSPYGVFNSMSGGAETGIVAQYAYVLGELERRAKAGKRLAFVHLVEPRVTDPSLVEGEGEYSEGTNDFAYSIWKGPIIRAGNYALHPEVVREQVKDPRTLIGYGRFFISNPDLVYRLEEGLPLNKYDRSTFYTMSAEGYTDYPTYEEAVDLGWNKN

SEQ ID NO: 71 - DNA, 1200 bp, synthetic construct
  misc_feature 1..1200: note = ERED chimera of Old Yellow Enzyme
  source 1..1200: mol_type = other DNA
atgtctttcgttaaggacttcaagccgcaggcactgcgcgacaccaacctgttcgaacctattaaaattgggaacacacagctggctcatcgcgcggtaatgcctccgctgacccgcatgcgcgctacccatccgggcaacattccgaacaaggagtgggctgcggtttactacggccagcgtgcacagcgtccggggacaatgattatcacggaggcgacgttcatcagcccgcaggcaggtgggtacgataacaagcctggtgtttggtcagacgaacaggttgccgaatggaagaacatcttcctggctattcatgactgtcagtcatttgcgtgggtgcaactgcaggtcctgggctgggccgcctttccggataacctggcgcgtgatgggttacgttacgattctgcctccgataatgtgtatatgaatgcggaacaggaggaaaaagcgaaaaaagctaacaatccgcaacatagcattactaaagacgaaattaaacaatatgtcaaagaatatgttcaggcagctaagaactcgatctgggcgggtgcggacggcgtggaaattcactcagccaacggttatctgttaaatcagttcctggatccgcacagcaacaaccgcaccgatgagtatgggggctcaattgaaaatcgtgcacgttttactctggaagtcgttgacgcggtggttgatgccatcggcccagaaaaagtgggtttacgtctgagtccgtacggcgttttcaactctatgtcgggcggcgcggaaacgggcattgttgctcagtatgcctatgtcctgggtgagctggagcgtcgcgccaaggcggggaaacgcctggcgtttgttcatttagtcgaaccacgcgtgacagacccttctctggttgagggggagggcgaatactcagagggcaccaacgattttgcttattccatttggaaaggtccgattatccgtgccggcaactacgcactacatcctgaagtagtgcgcgaacaagttaaggaccctcgcaccctgatcggctacggccgcttctttatttcaaatccagacctggtttaccgcttagaagaaggtctgccactgaacaagtatgaccgttctacgttctacaccatgagcgcggagggttacaccgactacccgacctacgaagaagccgtagatctgggctggaacaaaaac

SEQ ID NO: 72 - protein, 400 aa, synthetic construct
  REGION 1..400: note = ERED chimera of Old Yellow Enzyme
MSFVKDFKPQALRDTNLFEPIKIGNTQLAHRAVMPPLTRMRATHPGNIPNKEWAAVYYGQRAQRPGTMIITEATFISPQAGGYDNKPGVWSDEQVAEWKNIFLAIHDCQSFAWVQLQVLGWAAFPDNLARDGLRYDSASDNVYMNAEQEEKAKKANNPQHSITKDEIKQYVKEYVQAAKNSIWAGADGVEIHSANGYLLNQFLDPHSNNRTDEYGGSIENRARFTLEVVDAVVDAIGPEKVGLRLSPYGVFNSMSGGAETGIVAQYAYVLGELERRAKAGKRLAFVHLVEPRVTDPSLVEGEGEYSEGTNDFAYSIWKGPIIRAGNYALHPEVVREQVKDPRTLIGYGRFFISNPDLVYRLEEGLPLNKYDRSTFYTMSAEGYTDYPTYEEAVDLGWNKN

SEQ ID NO: 73 - DNA, 1200 bp, synthetic construct
  misc_feature 1..1200: note = ERED chimera of Old Yellow Enzyme
  source 1..1200: mol_type = other DNA
atgtctttcgttaaggacttcaagccgcaggcactgcgcgacaccaacctgttcgaacctattaaaattgggaacacacagctggctcatcgcgcggtaatgcctccgctgacccgcatgcgcgctacccatccgggcaacattccgaacaaggagtgggctgcggtttactacggccagcgtgcacagcgtccggggacaatgattatcacggaggcgacgttcatcagcccgcaggcaggtgggtacgataacaagcctggtgtttggtcagacgaacaggttgccgaatggaagaacatcttcctggctattcatgactgtcagtcatttgcgtgggtgcaactgcaggtcctgggctgggccgcctttccggataacctggcgcgtgatgggttacgttacgattctgcctccgataatgtgtatatgaatgcggaacaggaggaaaaagcgaaaaaagctggtaatccgcaacatagcattactaaagacgaaattaaacaatatgtcaaagaatatgttcaggcagctaagaactcgatcgctgcgggtgcggacggcgtggaaattcactcagccaacggttatctgttaaatcagttcctggatccgcacagcaacaaccgcaccgatgagtatgggggctcaattgaaaatcgtgcacgttttactctggaagtcgttgacgcggtggttgatgccatcggcccagaaaaagtgggtttacgtctgagtccgtacggcgttttcaactctatgtcgggcggcgcggaaacgggcattgttgctcagtatgcctatgtcctgggtgagctggagcgtcgcgccaaggcggggaaacgcctggcgtttgttcatttagtcgaaccacgcgtgacagacccttctctggttgagggggagggcgaatactcagagggcaccaacgattttgcttattccatttggaaaggtccgattatccgtgccggcaactacgcactacatcctgaagtagtgcgcgaacaagttaaggaccctcgcaccctgatcggctacggccgcttctttatttcaaatccagacctggtttaccgcttagaagaaggtctgccactgaacaagtatgaccgttctacgttctacaccatgagcgcggagggttacaccgactacccgacctacgaagaagccgtagatctgggctggaacaaaaac

SEQ ID NO: 74 - protein, 400 aa, synthetic construct
  REGION 1..400: note = ERED chimera of Old Yellow Enzyme
MSFVKDFKPQALRDTNLFEPIKIGNTQLAHRAVMPPLTRMRATHPGNIPNKEWAAVYYGQRAQRPGTMIITEATFISPQAGGYDNKPGVWSDEQVAEWKNIFLAIHDCQSFAWVQLQVLGWAAFPDNLARDGLRYDSASDNVYMNAEQEEKAKKAGNPQHSITKDEIKQYVKEYVQAAKNSIAAGADGVEIHSANGYLLNQFLDPHSNNRTDEYGGSIENRARFTLEVVDAVVDAIGPEKVGLRLSPYGVFNSMSGGAETGIVAQYAYVLGELERRAKAGKRLAFVHLVEPRVTDPSLVEGEGEYSEGTNDFAYSIWKGPIIRAGNYALHPEVVREQVKDPRTLIGYGRFFISNPDLVYRLEEGLPLNKYDRSTFYTMSAEGYTDYPTYEEAVDLGWNKN

SEQ ID NO: 75 - DNA, 1200 bp, synthetic construct
  misc_feature 1..1200: note = ERED chimera of Old Yellow Enzyme
  source 1..1200: mol_type = other DNA
atgtctttcgttaaggacttcaagccgcaggcactgcgcgacaccaacctgttcgaacctattaaaattgggaacacacagctggctcatcgcgcggtaatgcctccgctgacccgcatgcgcgctacccatccgggcaacattccgaacaaggagtgggctgcggtttactacggccagcgtgcacagcgtccggggacaatgattatcacggaggcgacgttcatcagcccgcaggcaggtgggtacgataacaagcctggtgtttggtcagaggaacaggttgccgaatggaagaacatcttcctggctattcatgactgtcagtcatttgcgtgggtgcaactgcaggtcctgggctgggccgcctttccggataacctggcgcgtgatgggttacgttacgattctgcctccgataatgtgtatatgaatgcggaacaggaggaaaaagcgaaaaaagctaacaatccgcaacatagcattactaaagacgaaattaaacaatatgtcaaagaatatgttcaggcagctaagaactcgatcgctgcgggtgcggacggcgtggaaattcactcagccaacggttatctgttaaatcagttcctggatccgcacagcaacaaccgcaccgatgagtatgggggctcaattgaaaatcgtgcacgttttactctggaagtcgttgacgcggtggttgatgccatcggcccagaaaaagtgggtttacgtctgagtccgtacggcgttttcaactctatgtcgggcggcgcggaaacgggcattgttgctcagtatgcctatgtcctgggtgagctggagcgtcgcgccaaggcggggaaacgcctggcgtttgttcatttagtcgaaccacgcgtgacagacccttctctggttgagggggagggcgaatactcagagggcaccaacgattttgcttattccatttggaaaggtccgattatccgtgccggcaactacgcactacatcctgaagtagtgcgcgaacaagttaaggaccctcgcaccctgatcggctacggccgcttctttatttcaaatccagacctggtttaccgcttagaagaaggtctgccactgaacaagtatgaccgttctacgttctacaccatgagcgcggagggttacaccgactacccgacctacgaagaagccgtagatctgggctggaacaaaaac

SEQ ID NO: 76 - protein, 400 aa, synthetic construct
  REGION 1..400: note = ERED chimera of Old Yellow Enzyme
MSFVKDFKPQALRDTNLFEPIKIGNTQLAHRAVMPPLTRMRATHPGNIPNKEWAAVYYGQRAQRPGTMIITEATFISPQAGGYDNKPGVWSEEQVAEWKNIFLAIHDCQSFAWVQLQVLGWAAFPDNLARDGLRYDSASDNVYMNAEQEEKAKKANNPQHSITKDEIKQYVKEYVQAAKNSIAAGADGVEIHSANGYLLNQFLDPHSNNRTDEYGGSIENRARFTLEVVDAVVDAIGPEKVGLRLSPYGVFNSMSGGAETGIVAQYAYVLGELERRAKAGKRLAFVHLVEPRVTDPSLVEGEGEYSEGTNDFAYSIWKGPIIRAGNYALHPEVVREQVKDPRTLIGYGRFFISNPDLVYRLEEGLPLNKYDRSTFYTMSAEGYTDYPTYEEAVDLGWNKN

SEQ ID NO: 77 - DNA, 1200 bp, synthetic construct
  misc_feature 1..1200: note = ERED chimera of Old Yellow Enzyme
  source 1..1200: mol_type = other DNA
atgtctttcgttaaggacttcaagccgcaggcactgcgcgacaccaacctgttcgaacctattaaaattgggaacacacagctggctcatcgcgcggtaatgcctccgctgacccgcatgcgcgctacccatccgggcaacattccgaacaaggagtgggctgcggtttactacggccagcgtgcacagcgtccggggacaatgattatcacggaggcgacgttcatcagcccgcaggcaggtgggtacgataacaagcctggtgtttggtcagacgaacaggttgccgaatggaagaacatcttcctggctattcatgactgtcagtcatttgcgtgggtgcaactgcaggtcctgggctgggccgcctttccggataacctggcgcgtgatgggttacgttacgattctgcctccgataatgtgtatatgaatgcggaacaggaggaaaaagcgaaaaaagctaacaatccgcaacatagcattactaaagacgaaattaaacaatatgtcaaagaatatgttcaggcagctaagaactcgatcgctgcgggtgcggacggcgtggaaattcactcagccaacggttatctgttaaatcagttcctggatccgcacagcaacaaccgcaccgatgagtatgggggctcaattgaaaatcgtgcacgttttactctggaagtcgttgacgcggtggttgatgccatcggcccagaaaaagtgggtttacgtctgagtccgtacggcgttttcaactctatgtcgggcggcgcggaaacgggcattgttgctcagtatgcctatgtcctgggtgagctggagcgtcgcgccaaggcggggaaacgcctggcgtttgttcatttagtcgaaccacgcgtgacagacccttctctggttgagggggagggcgaatactcagagggcaccaacgattttgcttattccatttggaaaggtccgattatccgtgccggcaactacgcactacatcctgaagtagtgcgcgaacaagttaaggaccctcgcaccctgatcggctacggccgcttctttatttcaaatccagacctggttcggcgcttagaagaaggtctgccactgaacaagtatgaccgttctacgttctacaccatgagcgcggagggttacaccgactacccgacctacgaagaagccgtagatctgggctggaacaaaaac

SEQ ID NO: 78 - protein, 400 aa, synthetic construct
  REGION 1..400: note = ERED chimera of Old Yellow Enzyme
MSFVKDFKPQALRDTNLFEPIKIGNTQLAHRAVMPPLTRMRATHPGNIPNKEWAAVYYGQRAQRPGTMIITEATFISPQAGGYDNKPGVWSDEQVAEWKNIFLAIHDCQSFAWVQLQVLGWAAFPDNLARDGLRYDSASDNVYMNAEQEEKAKKANNPQHSITKDEIKQYVKEYVQAAKNSIAAGADGVEIHSANGYLLNQFLDPHSNNRTDEYGGSIENRARFTLEVVDAVVDAIGPEKVGLRLSPYGVFNSMSGGAETGIVAQYAYVLGELERRAKAGKRLAFVHLVEPRVTDPSLVEGEGEYSEGTNDFAYSIWKGPIIRAGNYALHPEVVREQVKDPRTLIGYGRFFISNPDLVRRLEEGLPLNKYDRSTFYTMSAEGYTDYPTYEEAVDLGWNKN

SEQ ID NO: 79 - DNA, 1200 bp, synthetic construct
  misc_feature 1..1200: note = ERED chimera of Old Yellow Enzyme
  source 1..1200: mol_type = other DNA
atgtctttcgttaaggacttcaagccgcaggcactgcgcgacaccaacctgttcgaacctattaaaattgggaacacacagctggctcatcgcgcggtaatgcctccgctgacccgcatgcgcgctacccatccgggcaacattccgaacaaggagtgggctgcggtttactacggccagcgtgcacagcgtccggggacaatgattatcacggaggcgacgttcatcagcccgcaggcaggtgggtacgataacaagcctggtgtttggtcagacgaacaggttgccgaatggaagaacatcttcctggctattcatgcgtgtcagtcatttgcgtgggtgcaactgcaggtcctgggctgggccgcctttccggataacctggcgcgtgatgggttacgttacgattctgcctccgataatgtgtatatgaatgcggaacaggaggaaaaagcgaaaaaagctaacaatccgcaacatagcattactaaagacgaaattaaacaatatgtcaaagaatatgttcaggcagctaagaactcgatcgctgcgggtgcggacggcgtggaaattcactcagccaacggttatctgttaaatcagttcctggatccgcacagcaacaaccgcaccgatgagtatgggggctcaattgaaaatcgtgcacgttttactctggaagtcgttgacgcggtggttgatgccatcggcccagaaaaagtgggtttacgtctgagtccgtacggcgttttcaactctatgtcgggcggcgcggaaacgggcattgttgctcagtatgcctatgtcctgggtgagctggagcgtcgcgccaaggcggggaaacgcctggcgtttgttcatttagtcgaaccacgcgtgacagacccttctctggttgagggggagggcgaatactcagagggcaccaacgattttgcttattccatttggaaaggtccgattatccgtgccggcaactacgcactacatcctgaagtagtgcgcgaacaagttaaggaccctcgcaccctgatcggctacggccgcttctttatttcaaatccagacctggtttaccgcttagaagaaggtctgccactgaacaagtatgaccgttctacgttctacaccatgagcgcggagggttacaccgactacccgacctacgaagaagccgtagatctgggctggaacaaaaac

SEQ ID NO: 80 - protein, 400 aa, synthetic construct
  REGION 1..400: note = ERED chimera of Old Yellow Enzyme
MSFVKDFKPQALRDTNLFEPIKIGNTQLAHRAVMPPLTRMRATHPGNIPNKEWAAVYYGQRAQRPGTMIITEATFISPQAGGYDNKPGVWSDEQVAEWKNIFLAIHACQSFAWVQLQVLGWAAFPDNLARDGLRYDSASDNVYMNAEQEEKAKKANNPQHSITKDEIKQYVKEYVQAAKNSIAAGADGVEIHSANGYLLNQFLDPHSNNRTDEYGGSIENRARFTLEVVDAVVDAIGPEKVGLRLSPYGVFNSMSGGAETGIVAQYAYVLGELERRAKAGKRLAFVHLVEPRVTDPSLVEGEGEYSEGTNDFAYSIWKGPIIRAGNYALHPEVVREQVKDPRTLIGYGRFFISNPDLVYRLEEGLPLNKYDRSTFYTMSAEGYTDYPTYEEAVDLGWNKN

SEQ ID NO: 81 - DNA, 1200 bp, synthetic construct
  misc_feature 1..1200: note = ERED chimera of Old Yellow Enzyme
  source 1..1200: mol_type = other DNA
atgtctttcgttaaggacttcaagccgcaggcactgcgcgacaccaacctgctcgaacctattaaaattgggaacacacagctggctcatcgcgcggtaatgcctccgctgacccgcatgcgcgctacccatccgggcaacattccgaacaaggagtgggctgcggtttactacggccagcgtgcacagcgtccggggacaatgattatcacggaggcgacgttcatcagcccgcaggcaggtgggtacgataacaagcctggtgtttggtcagacgaacaggttgccgaatggaagaacatcttcggggctattcatgactgtcagtcatttgcgtgggtgcaactgcaggtcctgggctgggccgcctttccggataacctggcgcgtgatgggttacgttacgattctgcctccgataatgtgtatatgaatgcggaacaggaggaaaaagcgaaaaaagctaacaatccgcaacatagcattactaaagacgaaattaaacaatatgtcaaagaatatgttcaggcagctaagaactcgatcgctgcgggtgcggacggcgtggaaattcactcagccaacggttatctgttaaatcagttcctggatccgcacagcaacaaccgcaccgatgagtatgggggctcaattgaaaatcgtgcacgttttactctggaagtcgttgacgcggtggttgatgccatcggcccagaaaaagtgggtttacgtctgagtccgtacggcgttttcaactctatgtcgggcggcgcggaaacgggcattgttgctcagtatgcctatgtcctgggtgagctggagcgtcgcgccaaggcggggaaacgcctggcgtttgttcatttagtcgaaccacgcgtgacagacccttctctggttgagggggagggcgaatactcagagggcaccaacgattttgcttattccatttggaaaggtccgattatccgtgccggcaactacgcactacatcctgaagtagtgcgcgaacaagttaaggaccctcgcaccctgatcggctacggccgcttctttatttcaaatccagacctggtttaccgcttagaagaaggtctgccactgaacaagtatgaccgttctacgttctacaccatgagcgcggagggttacaccgactacccgacctacgaagaagccgtagatctgggctggaacaaaaac

SEQ ID NO: 82 - protein, 400 aa, synthetic construct
  REGION 1..400: note = ERED chimera of Old Yellow Enzyme
MSFVKDFKPQALRDTNLLEPIKIGNTQLAHRAVMPPLTRMRATHPGNIPNKEWAAVYYGQRAQRPGTMIITEATFISPQAGGYDNKPGVWSDEQVAEWKNIFGAIHDCQSFAWVQLQVLGWAAFPDNLARDGLRYDSASDNVYMNAEQEEKAKKANNPQHSITKDEIKQYVKEYVQAAKNSIAAGADGVEIHSANGYLLNQFLDPHSNNRTDEYGGSIENRARFTLEVVDAVVDAIGPEKVGLRLSPYGVFNSMSGGAETGIVAQYAYVLGELERRAKAGKRLAFVHLVEPRVTDPSLVEGEGEYSEGTNDFAYSIWKGPIIRAGNYALHPEVVREQVKDPRTLIGYGRFFISNPDLVYRLEEGLPLNKYDRSTFYTMSAEGYTDYPTYEEAVDLGWNKN

SEQ ID NO: 83 - DNA, 1200 bp, synthetic construct
  misc_feature 1..1200: note = ERED chimera of Old Yellow Enzyme
  source 1..1200: mol_type = other DNA
atgtctttcgttaaggacttcaagccgcaggcactgcgcgacaccaacctgttcgaacctattaaaattgggaacacacagctggctcatcgcgcggtaatgcctccgctgacccgcatgcgcgctacccatccgggcaacattccgaacaaggagtgggctgcggtttactacggccagcgtgcacagcgtccggggacaatgattatcacggaggcgacgttcatcagcccgcaggcaggtgggtacgataacaagcctggtgtttggtcagacgaacaggttgccgaatggaagaacatcttcctggctattcatgactgtcagtcatttgcgtgggtgcaactgcaggtcctgggctgggccgcctttccggataacctggcgcgtgatgggttacgttacgattctgcctccgataatgtgtatatgaatgcggaacaggaggaaaaagcgaaaagggctaacaatccgcaacatagcattactaaagacgaaattaaacaatatgtcaaagaatatgttcaggcagctaagaactcgatcgctgcgggtgcggacggcgtggaaattcactcagccaacggttatctgttaaatcagttcctggatccgcacagcaacaaccgcaccgatgagtatgggggctcaattgaaaatcgtgcacgttttactctggaagtcgttgacgcggtggttgatgccatcggcccagaaaaagtgggtttacgtctgagtccgtacggcgttttcaactctatgtcgggcggcgcggaaacgggcattgttgctcagtatgcctatgtcctgggtgagctggagcgtcgcgccaaggcggggaaacgcctggcgtttgttcatttagtcgaaccacgcgtgacagacccttctctggttgagggggagggcgaatactcagagggcaccaacgattttgcttattccatttggaaaggtccgattatccgtgccggcaactacgcactacatcctgaagtagtgcgcgaacaagttaaggaccctcgcaccctgatcggctacggccgcttctttatttcaaatccagacctggtttaccgcttagaagaaggtctgccactgaacaagtatgaccgttctacgttctacaccatgagcgcggagggttacaccgactacccgacctacgaagaagccgtagatctgggctggaacaaaaac

SEQ ID NO: 84 - protein, 400 aa, synthetic construct
  REGION 1..400: note = ERED chimera of Old Yellow Enzyme
MSFVKDFKPQALRDTNLFEPIKIGNTQLAHRAVMPPLTRMRATHPGNIPNKEWAAVYYGQRAQRPGTMIITEATFISPQAGGYDNKPGVWSDEQVAEWKNIFLAIHDCQSFAWVQLQVLGWAAFPDNLARDGLRYDSASDNVYMNAEQEEKAKRANNPQHSITKDEIKQYVKEYVQAAKNSIAAGADGVEIHSANGYLLNQFLDPHSNNRTDEYGGSIENRARFTLEVVDAVVDAIGPEKVGLRLSPYGVFNSMSGGAETGIVAQYAYVLGELERRAKAGKRLAFVHLVEPRVTDPSLVEGEGEYSEGTNDFAYSIWKGPIIRAGNYALHPEVVREQVKDPRTLIGYGRFFISNPDLVYRLEEGLPLNKYDRSTFYTMSAEGYTDYPTYEEAVDLGWNKN

SEQ ID NO: 85 - DNA, 1200 bp, synthetic construct
  misc_feature 1..1200: note = ERED chimera of Old Yellow Enzyme
  source 1..1200: mol_type = other DNA
atgtctttcgttaaggacttcaagccgcaggcactgcgcgacaccaacctgttcgaacctattaaaattgggaacacacagctggctcatcgcgcggtaatgcctccgctgacccgcatgcgcgctacccatccgggcaacattccgaacaaggagtgggctgcgcagtactacggccagcgtgcacagcgtccggggacaatgattatcacggaggcgacgttcatcagcccgcaggcaggtgggtacgataacaagcctggtgtttggtcagacgaacaggttgccgaatggaagaacatcttcctggctattcatgactgtcagtcatttgcgtgggtgcaactgcaggtcctgggctgggccgcctttccggataacctggcgcgtgatgggttacgttacgattctgcctccgataatgtgtatatgaatgcggaacaggaggaaaaagcgaaaaaagctaacaatccgcaacatagcattactaaagacgaaattaaacaatatgtcaaagaatatgttcaggcagctaagaactcgatcgctgcgggtgcggacggcgtggaaattcactcagccaacggttatctgttaaatcagttcctggatccgcacagcaacaaccgcaccgatgagtatgggggctcaattgaaaatcgtgcacgttttactctggaagtcgttgacgcggtggttgatgccatcggcccagaaaaagtgggtttacgtctgagtccgtacggcgttttcaactctatgtcgggcggcgcggaaacgggcattgttgctcagtatgcctatgtcctgggtgagctggagcgtcgcgccaaggcggggaaacgcctggcgtttgttcatttagtcgaaccacgcgtgacagacccttctctggttgagggggagggcgaatactcagagggcaccaacgattttgcttattccatttggaaaggtccgattatccgtgccggcaactacgcactacatcctgaagtagtgcgcgaacaagttaaggaccctcgcaccctgatcggctacggccgcttctttatttcaaatccagacctggtttaccgcttagaagaaggtctgccactgaacaagtatgaccgttctacgttctacaccatgagcgcggagggttacaccgactacccgacctacgaagaagccgtagatctgggctggaacaaaaac

SEQ ID NO: 86 - protein, 400 aa, synthetic construct
  REGION 1..400: note = ERED chimera of Old Yellow Enzyme
MSFVKDFKPQALRDTNLFEPIKIGNTQLAHRAVMPPLTRMRATHPGNIPNKEWAAQYYGQRAQRPGTMIITEATFISPQAGGYDNKPGVWSDEQVAEWKNIFLAIHDCQSFAWVQLQVLGWAAFPDNLARDGLRYDSASDNVYMNAEQEEKAKKANNPQHSITKDEIKQYVKEYVQAAKNSIAAGADGVEIHSANGYLLNQFLDPHSNNRTDEYGGSIENRARFTLEVVDAVVDAIGPEKVGLRLSPYGVFNSMSGGAETGIVAQYAYVLGELERRAKAGKRLAFVHLVEPRVTDPSLVEGEGEYSEGTNDFAYSIWKGPIIRAGNYALHPEVVREQVKDPRTLIGYGRFFISNPDLVYRLEEGLPLNKYDRSTFYTMSAEGYTDYPTYEEAVDLGWNKN

SEQ ID NO: 87 - DNA, 1200 bp, synthetic construct
  misc_feature 1..1200: note = ERED chimera of Old Yellow Enzyme
  source 1..1200: mol_type = other DNA
atgtctttcgttaaggacttcaagccgcaggcactgcgcgacaccaacctgttcgaacctattaaaattgggaacacacagctggctcatcgcgcggtaatgcctccgctgacccgcatgcgcgctacccatccgggcaacattccgaacaaggagtgggctgcggtttactacggccagcgtgcacagcgtccggggacaatgattatcacggaggcgacgttcatcagcccgcaggcaggtgggtacgataacaagcctggtgtttggtcagacgaacaggttgccgaatggaagaacatcttcctggctattcatgactgtcagtcatttgcgtgggtgcaactgcaggtcctgggctgggccgcctttccggataacctggcgcgtgatgggttacgttacgattctgcctccgataatgtgtatatgaatgcggaacaggaggaaaaagcgaaaaaagctaacaatccgcaacatagcattactaaagacgaaattaaacaatatgtcaaagaatatgttcaggcagctaagaactcgatcgctgcgggtgcggacggcgtggaaattcactcagccaacggttatctgttaaatcagttcctggatccgcacagcaacaaccgcaccgatgagtatgggggctcaattgaaaatcgtgcacgttttactctggaagtcgttgacgcggtggttgatgccatcggcccagaaaaagtgggtttacgtctgagtccgtacggcgttttcaactctatgtcgggcggcgcggaaacgggcattgttgctcagtatgcctatgtcctgggtgagctggagcgtcgcgccaaggcggggaaacgcctggcgtttgttcatttagtcgaaccacgcgtgacagacccttctctggttgagggggagggcgaatactcagagggcaccaacgattttgcttattccatttggaaaggtccgattatccgtgccggcaactacgcactacatcctgaagtagtgcgcgaacaagttaaggaccctcgcaccctgatcggctacggccgcttctttatttcaaatccagacctggtttaccgcttagaagaaggtctgccactgaacaagtatgaccgttctacgttctacaccatgagcgcggagggttacaccgactacccgacctacgaagaagccgtagcgctgggctggaacaaaaac

SEQ ID NO: 88 - protein, 400 aa, synthetic construct
  REGION 1..400: note = ERED chimera of Old Yellow Enzyme
MSFVKDFKPQALRDTNLFEPIKIGNTQLAHRAVMPPLTRMRATHPGNIPNKEWAAVYYGQRAQRPGTMIITEATFISPQAGGYDNKPGVWSDEQVAEWKNIFLAIHDCQSFAWVQLQVLGWAAFPDNLARDGLRYDSASDNVYMNAEQEEKAKKANNPQHSITKDEIKQYVKEYVQAAKNSIAAGADGVEIHSANGYLLNQFLDPHSNNRTDEYGGSIENRARFTLEVVDAVVDAIGPEKVGLRLSPYGVFNSMSGGAETGIVAQYAYVLGELERRAKAGKRLAFVHLVEPRVTDPSLVEGEGEYSEGTNDFAYSIWKGPIIRAGNYALHPEVVREQVKDPRTLIGYGRFFISNPDLVYRLEEGLPLNKYDRSTFYTMSAEGYTDYPTYEEAVALGWNKN

SEQ ID NO: 89 - DNA, 1200 bp, synthetic construct
  misc_feature 1..1200: note = ERED chimera of Old Yellow Enzyme
  source 1..1200: mol_type = other DNA
atgtctttcgttaaggacttcaagccgcaggcactgcgcgacaccaacctgttcgaacctattaaaattgggaacacacagctggctcatcgcgcggtaatgcctccgctgacccgcatgcgcgctacctatccgggcaacattccgaacaaggagtgggctgcggtttactacggccagcgtgcacagcgtccggggacaatgattatcacggaggcgacgttcatcagcccgcaggcaggtgggtacgataacaagcctggtgtttggtcagacgaacaggttgccgaatggaagaacatcttcctggctattcatgactgtcagtcatttgcgtgggtgcaactgcaggtcctgggctgggccgcctttccggataacctggcgcgtgatgggttacgttacgattctgcctccgataatgtgtatatgaatgcggaacaggaggaaaaagcgaaaaaagctaacaatccgcaacatagcattactaaagacgaaattaaacaatatgtcaaagaatatgttcaggcagctaagaactcgatcgctgcgggtgcggacggcgtggaaattcactcagccaacggttatctgttaaatcagttcctggatccgcacagcaacaaccgcaccgatgagtatgggggctcaattgaaaatcgtgcacgttttactctggaagtcgttgacgcggtggttgatgccatcggcccagaaaaagtgggtttacgtctgagtccgtacggcgttttcaactctatgtcgggcggcgcggaaacgggcattgttgctcagtatgcctatgtcctgggtgagctggagcgtcgcgccaaggcggggaaacgcctggcgtttgttcatttagtcgaaccacgcgtgacagacccttctctggttgagggggagggcgaatactcagagggcaccaacgattttgcttattccatttggaaaggtccgattatccgtgccggcaactacgcactacatcctgaagtagtgcgcgaacaagttaaggaccctcgcaccctgatcggctacggccgcttctttatttcaaatccagacctggtttaccgcttagaagaaggtctgccactgaacaagtatgaccgttctacgttctacaccatgagcgcggagggttacaccgactacccgacctacgaagaagccgtagatctgggctggaacaaaaac

SEQ ID NO: 90 - protein, 400 aa, synthetic construct
  REGION 1..400: note = ERED chimera of Old Yellow Enzyme
MSFVKDFKPQALRDTNLFEPIKIGNTQLAHRAVMPPLTRMRATYPGNIPNKEWAAVYYGQRAQRPGTMIITEATFISPQAGGYDNKPGVWSDEQVAEWKNIFLAIHDCQSFAWVQLQVLGWAAFPDNLARDGLRYDSASDNVYMNAEQEEKAKKANNPQHSITKDEIKQYVKEYVQAAKNSIAAGADGVEIHSANGYLLNQFLDPHSNNRTDEYGGSIENRARFTLEVVDAVVDAIGPEKVGLRLSPYGVFNSMSGGAETGIVAQYAYVLGELERRAKAGKRLAFVHLVEPRVTDPSLVEGEGEYSEGTNDFAYSIWKGPIIRAGNYALHPEVVREQVKDPRTLIGYGRFFISNPDLVYRLEEGLPLNKYDRSTFYTMSAEGYTDYPTYEEAVDLGWNKN

SEQ ID NO: 91 - DNA, 1200 bp, synthetic construct
  misc_feature 1..1200: note = ERED chimera of Old Yellow Enzyme
  source 1..1200: mol_type = other DNA
atgtctttcgttaaggacttcaagccgcaggcactgcgcgacaccaacctgttcgaacctattaaaattgggaacacacagctggctcatcgcgcggtaatgcctccgctgacccgcatgcgcgctacccatccgggcaacattccgaacaaggagtgggctgcggtttactacggccagcgtgcacagcgtccggggacaatgattatcacggaggcgacgttcatcagcccgcaggcaggtgggtacgataacaagcctggtgtttggtcagacgaacaggttgccgaatggaagaacatcttcctggctattcatgactgtcagtcatttgcgtgggtgcaactgcaggtcctgggctgggccgcctttccggataacctggcgcgtgatgggttacgttacgattctgcctccgataatgtgtatatgaatgcggaacaggaggaaaaagcgaaaaaagctaacaatccgcaacatagcattactaaagacgaaattaaacaatatgtccgggaatatgttcaggcagctaagaactcgatcgctgcgggtgcggacggcgtggaaattcactcagccaacggttatctgttaaatcagttcctggatccgcacagcaacaaccgcaccgatgagtatgggggctcaattgaaaatcgtgcacgttttactctggaagtcgttgacgcggtggttgatgccatcggcccagaaaaagtgggtttacgtctgagtccgtacggcgttttcaactctatgtcgggcggcgcggaaacgggcattgttgctcagtatgcctatgtcctgggtgagctggagcgtcgcgccaaggcggggaaacgcctggcgtttgttcatttagtcgaaccacgcgtgacagacccttctctggttgagggggagggcgaatactcagagggcaccaacgattttgcttattccatttggaaaggtccgattatccgtgccggcaactacgcactacatcctgaagtagtgcgcgaacaagttaaggaccctcgcaccctgatcggctacggccgcttctttatttcaaatccagacctggtttaccgcttagaagaaggtctgccactgaacaagtatgaccgttctacgttctacaccatgagcgcggagggttacaccgactacccgacctacgaagaagccgtagatctgggctggaacaaaaac

SEQ ID NO: 92 - protein, 400 aa, synthetic construct
  REGION 1..400: note = ERED chimera of Old Yellow Enzyme
MSFVKDFKPQALRDTNLFEPIKIGNTQLAHRAVMPPLTRMRATHPGNIPNKEWAAVYYGQRAQRPGTMIITEATFISPQAGGYDNKPGVWSDEQVAEWKNIFLAIHDCQSFAWVQLQVLGWAAFPDNLARDGLRYDSASDNVYMNAEQEEKAKKANNPQHSITKDEIKQYVREYVQAAKNSIAAGADGVEIHSANGYLLNQFLDPHSNNRTDEYGGSIENRARFTLEVVDAVVDAIGPEKVGLRLSPYGVFNSMSGGAETGIVAQYAYVLGELERRAKAGKRLAFVHLVEPRVTDPSLVEGEGEYSEGTNDFAYSIWKGPIIRAGNYALHPEVVREQVKDPRTLIGYGRFFISNPDLVYRLEEGLPLNKYDRSTFYTMSAEGYTDYPTYEEAVDLGWNKN

SEQ ID NO: 93 - DNA, 1200 bp, synthetic construct
  misc_feature 1..1200: note = ERED chimera of Old Yellow Enzyme
  source 1..1200: mol_type = other DNA
atgtctttcgttaaggacttcaagccgcaggcactgcgcgacaccaacctgttcgaacctattaaaattgggaacacacagctggctcatcgcgcggtaatgcctccgctgacccgcatgcgcgctacccatccgggcaacattccgaacaaggagtgggctgcggtttactacggccagcgtgcacagcgtccggggacaatgattatcacggaggcgacgttcatcagcccgcaggcaggtgggtacgataacaagcctggtgtttggtcagacgaacaggttgccgaatggaagaacatcttcctggctattcatgactgtcagtcatttgcgtgggtgcaactgcaggtcctgggctgggccgcctttccggataacctggcgcgtgatgggttacgttacgattctgcctccgataatgtgtatatgaatgcggaacaggaggaaaaagcgaaaaaagctaacaatccgcaacatagcattactaaagacgaaattaaacaatatgtcaaagaatatgttcaggcagctaagaactcgatcgctgcgggtgcggacggcgtggaaattcactcagccaacggttatctgttaaatcagttcctggatccgcacagcaacaaccgcaccgatgagtatgggggctcaattgaaaatcgtgcacgttttactctggaagtcgttgacgcggtggttgatgccatcggcccagaaaaagtgggtttacgtctgagtccgtacggcgttttcaactctatgtcgggcggcgcggaaacgggcattgttgctcagtatgcctatgtcctgggtgagctggagcgtcgcgccaagctggggaaacgcctggcgtttgttcatttagtcgaaccacgcgtgacagacccttctctggttgagggggagggcgaatactcagagggcaccaacgattttgcttattccatttggaaaggtccgattatccgtgccggcaactacgcactacatcctgaagtagtgcgcgaacaagttaaggaccctcgcaccctgatcggctacggccgcttctttatttcaaatccagacctggtttaccgcttagaagaaggtctgccactgaacaagtatgaccgttctacgttctacaccatgagcgcggagggttacaccgactacccgacctacgaagaagccgtagatctgggctggaacaaaaac

SEQ ID NO: 94 - protein, 400 aa, synthetic construct
  REGION 1..400: note = ERED chimera of Old Yellow Enzyme
MSFVKDFKPQALRDTNLFEPIKIGNTQLAHRAVMPPLTRMRATHPGNIPNKEWAAVYYGQRAQRPGTMIITEATFISPQAGGYDNKPGVWSDEQVAEWKNIFLAIHDCQSFAWVQLQVLGWAAFPDNLARDGLRYDSASDNVYMNAEQEEKAKKANNPQHSITKDEIKQYVKEYVQAAKNSIAAGADGVEIHSANGYLLNQFLDPHSNNRTDEYGGSIENRARFTLEVVDAVVDAIGPEKVGLRLSPYGVFNSMSGGAETGIVAQYAYVLGELERRAKLGKRLAFVHLVEPRVTDPSLVEGEGEYSEGTNDFAYSIWKGPIIRAGNYALHPEVVREQVKDPRTLIGYGRFFISNPDLVYRLEEGLPLNKYDRSTFYTMSAEGYTDYPTYEEAVDLGWNKN

SEQ ID NO: 95 - DNA, 1200 bp, synthetic construct
  misc_feature 1..1200: note = ERED chimera of Old Yellow Enzyme
  source 1..1200: mol_type = other DNA
atgtctttcgttaaggacttcaagccgcaggcactgcgcgacaccaacctgttcgaacctattaaaattgggaacacacagctggctcatcgcgcggtaatgcctccgctgacccgcatgcgcgctacccatccgggcaacattccgaacaaggagtgggctgcggtttactacggccagcgtgcacagcgtccggggacaatgattatcacggaggcgacgttcatcagcccgcaggcaggtgggtacgataacaagcctggtgtttggtcagacgaacaggttgccgaatggaagaacatcttcctggctattcatgactgtcagtcatttgcgtgggtgcaactgcaggtcctgggctgggccgcctttccggataacctggcgcgtgatgggttacgttacgattctgcctccgataatgtgtatatgaatgcggaacaggaggaaaaagcgaaaaaagctaacaatccgcaacatagcattactaaagacgaaattaaacaatatgtcaaagaatatgttcaggcagctaagaactcgatcgctgcgggtgcggacggcgtggaaattcactcagccaacggttatctgttaaatcagttcctggatccgcacagcaacaaccgcaccgatgagtatgggggctcaattgaaaatcgtgcacgttttactctggaagtcgttgacgcggtggttgatgccatcggcccagaaaaagtgggtttacgtctgagtccgtacggcgttttcaactctatgtcgggcggcgcggaaacgggcattgttgctcagtatgcctatgtcctgggtgagctggagcgtcgcgccaagcaggggaaacgcctggcgtttgttcatttagtcgaaccacgcgtgacagacccttctctggttgagggggagggcgaatactcagagggcaccaacgattttgcttattccatttggaaaggtccgattatccgtgccggcaactacgcactacatcctgaagtagtgcgcgaacaagttaaggaccctcgcaccctgatcggctacggccgcttctttatttcaaatccagacctggtttaccgcttagaagaaggtctgccactgaacaagtatgaccgttctacgttctacaccatgagcgcggagggttacaccgactacccgacctacgaagaagccgtagatctgggctggaacaaaaac

SEQ ID NO: 96 - protein, 400 aa, synthetic construct
  REGION 1..400: note = ERED chimera of Old Yellow Enzyme
MSFVKDFKPQALRDTNLFEPIKIGNTQLAHRAVMPPLTRMRATHPGNIPNKEWAAVYYGQRAQRPGTMIITEATFISPQAGGYDNKPGVWSDEQVAEWKNIFLAIHDCQSFAWVQLQVLGWAAFPDNLARDGLRYDSASDNVYMNAEQEEKAKKANNPQHSITKDEIKQYVKEYVQAAKNSIAAGADGVEIHSANGYLLNQFLDPHSNNRTDEYGGSIENRARFTLEVVDAVVDAIGPEKVGLRLSPYGVFNSMSGGAETGIVAQYAYVLGELERRAKQGKRLAFVHLVEPRVTDPSLVEGEGEYSEGTNDFAYSIWKGPIIRAGNYALHPEVVREQVKDPRTLIGYGRFFISNPDLVYRLEEGLPLNKYDRSTFYTMSAEGYTDYPTYEEAVDLGWNKN

SEQ ID NO: 97 - DNA, 1200 bp, synthetic construct
  misc_feature 1..1200: note = ERED chimera of Old Yellow Enzyme
  source 1..1200: mol_type = other DNA
atgtctttcgttaaggacttcaagccgcaggcactgcgcgacaccaacctgttcgaacctattaaaattgggaacacacagctggctcatcgcgcggtaatgcctccgctgacccgcatgcgcgctacccatccgggcaacattccgaacaaggagtgggctgcggtttactacggccagcgtgcacagcgtccggggacaatgattatcacggaggcgacgttcatcagcccgcaggcaggtgggtacgataacaagcctggtgtttggtcagacgaacaggttgccgaatggaagaacatcttcctggctattcatgactgtcagtcatttgcgtgggtgcaactgcaggtcctgggctgggccgcctttccggataacctggcgcgtgatgggttacgttacgattctgcctccgataatgtgtatatgaatgcggaacaggaggaaaaagcgaaaaaagctaacaatccgcaacatagcattactaaagacgaaattaaacaatatgtcaaagaatatgttcaggcagctaagaactcgatctttgcgggtgcggacggcgtggaaattcactcagccaacggttatctgttaaatcagttcctggatccgcacagcaacaaccgcaccgatgagtatgggggctcaattgaaaatcgtgcacgttttactctggaagtcgttgacgcggtggttgatgccatcggcccagaaaaagtgggtttacgtctgagtccgtacggcgttttcaactctatgtcgggcggcgcggaaacgggcattgttgctcagtatgcctatgtcctgggtgagctggagcgtcgcgccaaggcggggaaacgcctggcgtttgttcatttagtcgaaccacgcgtgacagacccttctctggttgagggggagggcgaatactcagagggcaccaacgattttgcttattccatttggaaaggtccgattatccgtgccggcaactacgcactacatcctgaagtagtgcgcgaacaagttaaggaccctcgcaccctgatcggctacggccgcttctttatttcaaatccagacctggtttaccgcttagaagaaggtctgccactgaacaagtatgaccgttctacgttctacaccatgagcgcggagggttacaccgactacccgacctacgaagaagccgtagatctgggctggaacaaaaac

SEQ ID NO: 98 - protein, 400 aa, synthetic construct
  REGION 1..400: note = ERED chimera of Old Yellow Enzyme
MSFVKDFKPQALRDTNLFEPIKIGNTQLAHRAVMPPLTRMRATHPGNIPNKEWAAVYYGQRAQRPGTMIITEATFISPQAGGYDNKPGVWSDEQVAEWKNIFLAIHDCQSFAWVQLQVLGWAAFPDNLARDGLRYDSASDNVYMNAEQEEKAKKANNPQHSITKDEIKQYVKEYVQAAKNSIFAGADGVEIHSANGYLLNQFLDPHSNNRTDEYGGSIENRARFTLEVVDAVVDAIGPEKVGLRLSPYGVFNSMSGGAETGIVAQYAYVLGELERRAKAGKRLAFVHLVEPRVTDPSLVEGEGEYSEGTNDFAYSIWKGPIIRAGNYALHPEVVREQVKDPRTLIGYGRFFISNPDLVYRLEEGLPLNKYDRSTFYTMSAEGYTDYPTYEEAVDLGWNKN

SEQ ID NO: 99 - DNA, 1200 bp, synthetic construct
  misc_feature 1..1200: note = ERED chimera of Old Yellow Enzyme
  source 1..1200: mol_type = other DNA
atgtctttcgttaaggacttcaagccgcaggcactgcgcgacaccaacctgttcgaacctattaaaattgggaacacacagctggctcatcgcgcggtaatgcctccgctgacccgcatgcgcgctacccatccgggcaacattccgaacaaggagtgggctgcggtttactacggccagcgtgcacagcgtccggggacaatgattatcacggaggcgacgttcatcagcccgcaggcaggtgggtacgataacaagcctggtgtttggtcagacgaacaggttgccgaatggaagaacatcttcctggctattcatgactgtcagtcatttgcgtgggtgcaactgcaggtcctgggctgggccgccagtccggataacctggcgcgtgatgggttacgttacgattctgcctccgataatgtgtatatgaatgcggaacaggaggaaaaagcgaaaaaagctaacaatccgcaacatagcattactaaagacgaaattaaacaatatgtcaaagaatatgttcaggcagctaagaactcgatcgctgcgggtgcggacggcgtggaaattcactcagccaacggttatctgttaaatcagttcctggatccgcacagcaacaaccgcaccgatgagtatgggggctcaattgaaaatcgtgcacgttttactctggaagtcgttgacgcggtggttgatgccatcggcccagaaaaagtgggtttacgtctgagtccgtacggcgttttcaactctatgtcgggcggcgcggaaacgggcattgttgctcagtatgcctatgtcctgggtgagctggagcgtcgcgccaaggcggggaaacgcctggcgtttgttcatttagtcgaaccacgcgtgacagacccttctctggttgagggggagggcgaatactcagagggcaccaacgattttgcttattccatttggaaaggtccgattatccgtgccggcaactacgcactacatcctgaagtagtgcgcgaacaagttaaggaccctcgcaccctgatcggctacggccgcttctttatttcaaatccagacctggtttaccgcttagaagaaggtctgccactgaacaagtatgaccgttctacgttctacaccatgagcgcggagggttacaccgactacccgacctacgaagaagccgtagatctgggctggaacaaaaac

SEQ ID NO: 100 - protein, 400 aa, synthetic construct
  REGION 1..400: note = ERED chimera of Old Yellow Enzyme
MSFVKDFKPQALRDTNLFEPIKIGNTQLAHRAVMPPLTRMRATHPGNIPNKEWAAVYYGQRAQRPGTMIITEATFISPQAGGYDNKPGVWSDEQVAEWKNIFLAIHDCQSFAWVQLQVLGWAASPDNLARDGLRYDSASDNVYMNAEQEEKAKKANNPQHSITKDEIKQYVKEYVQAAKNSIAAGADGVEIHSANGYLLNQFLDPHSNNRTDEYGGSIENRARFTLEVVDAVVDAIGPEKVGLRLSPYGVFNSMSGGAETGIVAQYAYVLGELERRAKAGKRLAFVHLVEPRVTDPSLVEGEGEYSEGTNDFAYSIWKGPIIRAGNYALHPEVVREQVKDPRTLIGYGRFFISNPDLVYRLEEGLPLNKYDRSTFYTMSAEGYTDYPTYEEAVDLGWNKN

SEQ ID NO: 101 - DNA, 1200 bp, synthetic construct
  misc_feature 1..1200: note = ERED chimera of Old Yellow Enzyme
  source 1..1200: mol_type = other DNA
atgtctttcgttaaggacttcaagccgcttgcactgcgcgacaccaacctgttcgaacctattaaaattgggaacacacagctggctcatcgcgcggtaatgcctccgctgacccgcatgcgcgctacccatccgggcaacattccgaacaaggagtgggctgcggtttactacggccagcgtgcacagcgtccggggacaatgattatcacggaggcgacgttcatcagcccgcaggcaggtgggtacgataacaagcctggtgtttggtcagacgaacaggttgccgaatggaagaacatcttcctggctattcatgactgtcagtcatttgcgtgggtgcaactgcaggtcctgggctgggccgcctttccggataacctggcgcgtgatgggttacgttacgattctgcctccgataatgtgtatatgaatgcggaacaggaggaaaaagcgaaaaaagctaacaatccgcaacatagcattactaaagacgaaattaaacaatatgtcaaagaatatgttcaggcagctaagaactcgatcgctgcgggtgcggacggcgtggaaattcactcagccaacggttatctgttaaatcagttcctggatccgcacagcaacaaccgcaccgatgagtatgggggctcaattgaaaatcgtgcacgttttactctggaagtcgttgacgcggtggttgatgccatcggcccagaaaaagtgggtttacgtctgagtccgtacggcgttttcaactctatgtcgggcggcgcggaaacgggcattgttgctcagtatgcctatgtcctgggtgagctggagcgtcgcgccaaggcggggaaacgcctggcgtttgttcatttagtcgaaccacgcgtgacagacccttctctggttgagggggagggcgaatactcagagggcaccaacgattttgcttattccatttggaaaggtccgattatccgtgccggcaactacgcactacatcctgaagtagtgcgcgaacaagttaaggaccctcgcaccctgatcggctacggccgcttctttatttcaaatccagacctggtttaccgcttagaagaaggtctgccactgaacaagtatgaccgttctacgttctacaccatgagcgcggagggttacaccgactacccgacctacgaagaagccgtagatctgggctggaacaaaaac

SEQ ID NO: 102 - protein, 400 aa, synthetic construct
  REGION 1..400: note = ERED chimera of Old Yellow Enzyme
MSFVKDFKPLALRDTNLFEPIKIGNTQLAHRAVMPPLTRMRATHPGNIPNKEWAAVYYGQRAQRPGTMIITEATFISPQAGGYDNKPGVWSDEQVAEWKNIFLAIHDCQSFAWVQLQVLGWAAFPDNLARDGLRYDSASDNVYMNAEQEEKAKKANNPQHSITKDEIKQYVKEYVQAAKNSIAAGADGVEIHSANGYLLNQFLDPHSNNRTDEYGGSIENRARFTLEVVDAVVDAIGPEKVGLRLSPYGVFNSMSGGAETGIVAQYAYVLGELERRAKAGKRLAFVHLVEPRVTDPSLVEGEGEYSEGTNDFAYSIWKGPIIRAGNYALHPEVVREQVKDPRTLIGYGRFFISNPDLVYRLEEGLPLNKYDRSTFYTMSAEGYTDYPTYEEAVDLGWNKN

SEQ ID NO: 103 - DNA, 1200 bp, synthetic construct
  misc_feature 1..1200: note = ERED chimera of Old Yellow Enzyme
  source 1..1200: mol_type = other DNA
atgtctttcgttaaggacttcaagccgcaggcactgcgcgacaccaacctgttcgaacctattaaaattgggaacacacagctggctcatcgcgcggtaatgcctccgctgacccgcatgcgcgctacccatccgggcaacattccgaacaaggagtgggctgcggtttactacggccagcgtgcacagcgtccggggacaatgattatcacggaggcgacgttcatcagcccgcaggcaggtgggtacgataacaagcctggtgtttggtcagacgaacaggttgccgaatggaagaacatcttcctggctattcatgactgtcagtcatttgcgtgggtgcaactgcaggtcctgggctgggccgcctttccggataacctggcgcgtgatgggttacgttacgattctgcctccgataatgtgtatatgaatgcggaacaggaggaaaaagcgaaaaaagctaacaatccgcaacatagcattactaaagacgaaattaaacaatatgtcaaagaatatgttcaggcagctaagaactcgatcgctgcgggtgcggacggcgtggaaattcactcagccaacggttatctgttaaatcagttcctggatccgcacagcaacaaccgcaccgatgagtatgggggctcaattgaaaatcgtgcacgttttactctggaagtcgttgacgcggtggttgatgccatcggcccagaaaaagtgggtttacgtctgagtccgtacggcgttttcaactctatgtcgggcggcgcggaaacgggcattgttgctcagtatgcctatgtcctgggtgagctggagcgtcgcgccaaggcggggaaacgcctggcgtttgttcatttagtcgaaccacgcgtgacagacccttctctggttgagggggagggcgaatactcagagggcaccaacgattttgcttattccatttggaaaggtccgattatccgtgccggcaactacgcactacatcctgaagtagtgcgcgaacaagttaaggaccctcgcaccctgatcggctacggccgcttctttatttcaaatccagacctggtttaccgcttagaagaaggtctgccactgaacgcgtatgaccgttctacgttctacaccatgagcgcggagggttacaccgactacccgacctacgaagaagccgtagatctgggctggaacaaaaac

SEQ ID NO: 104 - protein, 400 aa, synthetic construct
  REGION 1..400: note = ERED chimera of Old Yellow Enzyme
MSFVKDFKPQALRDTNLFEPIKIGNTQLAHRAVMPPLTRMRATHPGNIPNKEWAAVYYGQRAQRPGTMIITEATFISPQAGGYDNKPGVWSDEQVAEWKNIFLAIHDCQSFAWVQLQVLGWAAFPDNLARDGLRYDSASDNVYMNAEQEEKAKKANNPQHSITKDEIKQYVKEYVQAAKNSIAAGADGVEIHSANGYLLNQFLDPHSNNRTDEYGGSIENRARFTLEVVDAVVDAIGPEKVGLRLSPYGVFNSMSGGAETGIVAQYAYVLGELERRAKAGKRLAFVHLVEPRVTDPSLVEGEGEYSEGTNDFAYSIWKGPIIRAGNYALHPEVVREQVKDPRTLIGYGRFFISNPDLVYRLEEGLPLNAYDRSTFYTMSAEGYTDYPTYEEAVDLGWNKN

SEQ ID NO: 105 - DNA, 1200 bp, synthetic construct
  misc_feature 1..1200: note = ERED chimera of Old Yellow Enzyme
  source 1..1200: mol_type = other DNA
atgtctttcgttaaggacttcaagccgcaggcactgcgcgacaccaacctgttcgaacctattaaaattgggaacacacagctggctcatcgcgcggtaatgcctccgctgacccgcatgcgcgctacccatccgggcaacattccgaacaaggagtgggctgcggtttactacggccagcgtgcacagcgtccggggacaatgattatcacggaggcgacgttcatcagcccgcaggcaggtgggtacgataacaagcctggtgtttggtcagacgaacaggttgccgaatggaagaacatcttcctggctattcatgactgtcagtcatttgcgtgggtgcaactgcaggtcctgggctgggccgcctttccggataacctggcgcgtgatgggttacgttacgattctgcctccgataatgtgtatatgaatgcggaacaggaggaaaaagcgaaaaaagctaacaatccgcaacatagcattactaaagacgaaattgggcaatatgtcaaagaatatgttcaggcagctaagaactcgatcgctgcgggtgcggacggcgtggaaattcactcagccaacggttatctgttaaatcagttcctggatccgcacagcaacaaccgcaccgatgagtatgggggctcaattgaaaatcgtgcacgttttactctggaagtcgttgacgcggtggttgatgccatcggcccagaaaaagtgggtttacgtctgagtccgtacggcgttttcaactctatgtcgggcggcgcggaaacgggcattgttgctcagtatgcctatgtcctgggtgagctggagcgtcgcgccaaggcggggaaacgcctggcgtttgttcatttagtcgaaccacgcgtgacagacccttctctggttgagggggagggcgaatactcagagggcaccaacgattttgcttattccatttggaaaggtccgattatccgtgccggcaactacgcactacatcctgaagtagtgcgcgaacaagttaaggaccctcgcaccctgatcggctacggccgcttctttatttcaaatccagacctggtttaccgcttagaagaaggtctgccactgaacaagtatgaccgttctacgttctacaccatgagcgcggagggttacaccgactacccgacctacgaagaagccgtagatctgggctggaacaaaaac

SEQ ID NO: 106 - protein, 400 aa, synthetic construct
  REGION 1..400: note = ERED chimera of Old Yellow Enzyme
MSFVKDFKPQALRDTNLFEPIKIGNTQLAHRAVMPPLTRMRATHPGNIPNKEWAAVYYGQRAQRPGTMIITEATFISPQAGGYDNKPGVWSDEQVAEWKNIFLAIHDCQSFAWVQLQVLGWAAFPDNLARDGLRYDSASDNVYMNAEQEEKAKKANNPQHSITKDEIGQYVKEYVQAAKNSIAAGADGVEIHSANGYLLNQFLDPHSNNRTDEYGGSIENRARFTLEVVDAVVDAIGPEKVGLRLSPYGVFNSMSGGAETGIVAQYAYVLGELERRAKAGKRLAFVHLVEPRVTDPSLVEGEGEYSEGTNDFAYSIWKGPIIRAGNYALHPEVVREQVKDPRTLIGYGRFFISNPDLVYRLEEGLPLNKYDRSTFYTMSAEGYTDYPTYEEAVDLGWNKN

SEQ ID NO: 107 - DNA, 1200 bp, synthetic construct
  misc_feature 1..1200: note = ERED chimera of Old Yellow Enzyme
  source 1..1200: mol_type = other DNA
atgtctttcgttaaggacttcaagccgcaggcactgcgcgacaccaacctgttcgaacctattaaaattgggaacacacagctggctcatcgcgcggtaatgcctccgctgacccgcatgcgcgctacccatccgggcaacattccgaacaaggagtgggctgcggtttactacggccagcgtgcacagcgtccggggacaatgattatcacggaggcgacgttcatcagcccgcaggcaggtgggtacgataacaagcctggtgtttggtcagacgaacaggttgccgaatggaagaacatcttcctggctattcatgactgtcagtcatttgcgtgggtgcaactgcaggtcctgggctgggccgcctttccggataacctggcgcgtgatgggttacgttacgattctgcctccgataatgtgtatatgaatgcggaacaggaggaaaaagcgaaaaaagctaacaatccgcaacatagcattactaaagacgaaattaaacaatatgtcaaagaatatgttcaggcagctaagaactcgatcgctgcgggtgcggacggcgtggaaattcactcagccaacggttatctgttaaatcagttcctggatccgcacagcaacaaccgcaccgatgagtatgggggctcaattgaaaatcgtgcacgttttactctggaagtcgttgacgcggtggttgatgccatcggcccagaaaaagtgggtttacgtctgagtccgtacggcgttttcaactctatgtcgggcggcgcggaaacgggcattgttgctcagtatgcctatgtcctgggtgagctggagcgtcgcgccaaggcggggaaacgcctggcgtttgttcatttagtcgaaccacgcgtgacagacccttctctggttgagggggagggcgaatactcagagggcaccaacgattttgcttattccatttggaaaggtccgattatccgtgccggcaactacgcactacatcctgaagtagtgcgcgaacaagttaaggaccctcgcaccctgatcggctacggccgcttctttatttcaaatccagacctggtttaccgcttagaagaaggtctgccactgaacaagtatgaccgttctacgttctacaccatgagcgcggagggttacaccgactacccgacctacgaagaagccgtagatctgggctgggagaaaaac

SEQ ID NO: 108 - protein, 400 aa, synthetic construct
  REGION 1..400: note = ERED chimera of Old Yellow Enzyme
MSFVKDFKPQALRDTNLFEPIKIGNTQLAHRAVMPPLTRMRATHPGNIPNKEWAAVYYGQRAQRPGTMIITEATFISPQAGGYDNKPGVWSDEQVAEWKNIFLAIHDCQSFAWVQLQVLGWAAFPDNLARDGLRYDSASDNVYMNAEQEEKAKKANNPQHSITKDEIKQYVKEYVQAAKNSIAAGADGVEIHSANGYLLNQFLDPHSNNRTDEYGGSIENRARFTLEVVDAVVDAIGPEKVGLRLSPYGVFNSMSGGAETGIVAQYAYVLGELERRAKAGKRLAFVHLVEPRVTDPSLVEGEGEYSEGTNDFAYSIWKGPIIRAGNYALHPEVVREQVKDPRTLIGYGRFFISNPDLVYRLEEGLPLNKYDRSTFYTMSAEGYTDYPTYEEAVDLGWEKN

SEQ ID NO: 109 - DNA, 1200 bp, synthetic construct
  misc_feature 1..1200: note = ERED chimera of Old Yellow Enzyme
  source 1..1200: mol_type = other DNA
atgtctttcgttaaggacttcaagccgcaggcactgcgcgacaccaacctgttcgaacctattaaaattgggaacacacagctggctcatcgcgcggtaatgcctccgctgacccgcatgcgcgctacccatccgggcaacattccgaacaaggagtgggctgcggtttactacggccagcgtgcacagcgtccggggacaatgattatcacggaggcgacgttcatcagcccgcaggcaggtgggtacgataacaagcctggtgtttggtcagacgaacaggttgccgaatggaagaacatcttcctggctattcatgactgtcagtcatttgcgtgggtgcaactgcaggtcctgggctgggccgcctttccggataacctggcgcgtgatgggttacgttacgattctgcctccgataatgtgtatatgaatgcggaacagtttgaaaaagcgaaaaaagctaacaatccgcaacatagcattactaaagacgaaattaaacaatatgtcaaagaatatgttcaggcagctaagaactcgatcgctgcgggtgcggacggcgtggaaattcactcagccaacggttatctgttaaatcagttcctggatccgcacagcaacaaccgcaccgatgagtatgggggctcaattgaaaatcgtgcacgttttactctggaagtcgttgacgcggtggttgatgccatcggcccagaaaaagtgggtttacgtctgagtccgtacggcgttttcaactctatgtcgggcggcgcggaaacgggcattgttgctcagtatgcctatgtcctgggtgagctggagcgtcgcgccaaggcggggaaacgcctggcgtttgttcatttagtcgaaccacgcgtgacagacccttctctggttgagggggagggcgaatactcagagggcaccaacgattttgcttattccatttggaaaggtccgattatccgtgccggcaactacgcactacatcctgaagtagtgcgcgaacaagttaaggaccctcgcaccctgatcggctacggccgcttctttatttcaaatccagacctggtttaccgcttagaagaaggtctgccactgaacaagtatgaccgttctacgttctacaccatgagcgcggagggttacaccgactacccgacctacgaagaagccgtagatctgggctggaacaaaaac

SEQ ID NO: 110 - protein, 400 aa, synthetic construct
  REGION 1..400: note = ERED chimera of Old Yellow Enzyme
MSFVKDFKPQALRDTNLFEPIKIGNTQLAHRAVMPPLTRMRATHPGNIPNKEWAAVYYGQRAQRPGTMIITEATFISPQAGGYDNKPGVWSDEQVAEWKNIFLAIHDCQSFAWVQLQVLGWAAFPDNLARDGLRYDSASDNVYMNAEQFEKAKKANNPQHSITKDEIKQYVKEYVQAAKNSIAAGADGVEIHSANGYLLNQFLDPHSNNRTDEYGGSIENRARFTLEVVDAVVDAIGPEKVGLRLSPYGVFNSMSGGAETGIVAQYAYVLGELERRAKAGKRLAFVHLVEPRVTDPSLVEGEGEYSEGTNDFAYSIWKGPIIRAGNYALHPEVVREQVKDPRTLIGYGRFFISNPDLVYRLEEGLPLNKYDRSTFYTMSAEGYTDYPTYEEAVDLGWNKN

SEQ ID NO: 111 - DNA, 1200 bp, synthetic construct
  misc_feature 1..1200: note = ERED chimera of Old Yellow Enzyme
  source 1..1200: mol_type = other DNA
atgtctttcgttaaggacttcaagccgcaggcactgcgcgacaccaacctgttcgaacctattaaaattgggaacacacagctggctcatcgcgcggtaatgcctccgctgacccgcatgcgcgctacccatccgggcaacattccgaacaaggagtgggctgcggtttactacggccagcgtgcacagcgtccggggacaatgattatcacggaggcgacgttcatcagcccgcaggcaggtgggtacgataacaagcctggtgtttggtcagacgaacaggttgccgaatggaagaacatcttccaggctattcatgactgtcagtcatttgcgtgggtgcaactgcaggtcctgggctgggccgcctttccggataacctggcgcgtgatgggttacgttacgattctgcctccgataatgtgtatatgaatgcggaacaggaggaaaaagcgaaaaaagctaacaatccgcaacatagcattactaaagacgaaattaaacaatatgtcaaagaatatgttcaggcagctaagaactcgatcgctgcgggtgcggacggcgtggaaattcactcagccaacggttatctgttaaatcagttcctggatccgcacagcaacaaccgcaccgatgagtatgggggctcaattgaaaatcgtgcacgttttactctggaagtcgttgacgcggtggttgatgccatcggcccagaaaaagtgggtttacgtctgagtccgtacggcgttttcaactctatgtcgggcggcgcggaaacgggcattgttgctcagtatgcctatgtcctgggtgagctggagcgtcgcgccaaggcggggaaacgcctggcgtttgttcatttagtcgaaccacgcgtgacagacccttctctggttgagggggagggcgaatactcagagggcaccaacgattttgcttattccatttggaaaggtccgattatccgtgccggcaactacgcactacatcctgaagtagtgcgcgaacaagttaaggaccctcgcaccctgatcggctacggccgcttctttatttcaaatccagacctggtttaccgcttagaagaaggtctgccactgaacaagtatgaccgttctacgttctacaccatgagcgcggagggttacaccgactacccgacctacgaagaagccgtagatctgggctggaacaaaaac

SEQ ID NO: 112 - protein, 400 aa, synthetic construct
  REGION 1..400: note = ERED chimera of Old Yellow Enzyme
MSFVKDFKPQALRDTNLFEPIKIGNTQLAHRAVMPPLTRMRATHPGNIPNKEWAAVYYGQRAQRPGTMIITEATFISPQAGGYDNKPGVWSDEQVAEWKNIFQAIHDCQSFAWVQLQVLGWAAFPDNLARDGLRYDSASDNVYMNAEQEEKAKKANNPQHSITKDEIKQYVKEYVQAAKNSIAAGADGVEIHSANGYLLNQFLDPHSNNRTDEYGGSIENRARFTLEVVDAVVDAIGPEKVGLRLSPYGVFNSMSGGAETGIVAQYAYVLGELERRAKAGKRLAFVHLVEPRVTDPSLVEGEGEYSEGTNDFAYSIWKGPIIRAGNYALHPEVVREQVKDPRTLIGYGRFFISNPDLVYRLEEGLPLNKYDRSTFYTMSAEGYTDYPTYEEAVDLGWNKN

SEQ ID NO: 113 - DNA, 1200 bp, synthetic construct
  misc_feature 1..1200: note = ERED chimera of Old Yellow Enzyme
  source 1..1200: mol_type = other DNA
atgtctttcgttaaggacttcaagccgcaggcactgcgcgacaccaacctgttcgaacctattaaaattgggaacacacagctggctcatcgcgcggtaatgcctccgctgacccgcatgcgcgctacccatccgggcaacattccgaacaaggagtgggctgcggtttactacggccagcgtgcacagcgtccggggacaatgattatcacggaggcgacgttcatcagcccgcaggcaggtgggtacgataacaagcctggtgtttggtcagacgaacaggttgccgaatggaagaacatcttcctggctattcatgactgtcagtcatttgcgtgggtgcaactgcaggtcctgggctgggccgcctttccggataacctggcgcgtgatgggttacgttacgattctgcctccgataatgtgtatatgaatgcggaacaggaggaaaaagcgaaaaaagctaacaatccgcaacatagcattactaaagacgaaattaaagtgtatgtcaaagaatatgttcaggcagctaagaactcgatcgctgcgggtgcggacggcgtggaaattcactcagccaacggttatctgttaaatcagttcctggatccgcacagcaacaaccgcaccgatgagtatgggggctcaattgaaaatcgtgcacgttttactctggaagtcgttgacgcggtggttgatgccatcggcccagaaaaagtgggtttacgtctgagtccgtacggcgttttcaactctatgtcgggcggcgcggaaacgggcattgttgctcagtatgcctatgtcctgggtgagctggagcgtcgcgccaaggcggggaaacgcctggcgtttgttcatttagtcgaaccacgcgtgacagacccttctctggttgagggggagggcgaatactcagagggcaccaacgattttgcttattccatttggaaaggtccgattatccgtgccggcaactacgcactacatcctgaagtagtgcgcgaacaagttaaggaccctcgcaccctgatcggctacggccgcttctttatttcaaatccagacctggtttaccgcttagaagaaggtctgccactgaacaagtatgaccgttctacgttctacaccatgagcgcggagggttacaccgactacccgacctacgaagaagccgtagatctgggctggaacaaaaac

SEQ ID NO: 114 - protein, 400 aa, synthetic construct
  REGION 1..400: note = ERED chimera of Old Yellow Enzyme
MSFVKDFKPQALRDTNLFEPIKIGNTQLAHRAVMPPLTRMRATHPGNIPNKEWAAVYYGQRAQRPGTMIITEATFISPQAGGYDNKPGVWSDEQVAEWKNIFLAIHDCQSFAWVQLQVLGWAAFPDNLARDGLRYDSASDNVYMNAEQEEKAKKANNPQHSITKDEIKVYVKEYVQAAKNSIAAGADGVEIHSANGYLLNQFLDPHSNNRTDEYGGSIENRARFTLEVVDAVVDAIGPEKVGLRLSPYGVFNSMSGGAETGIVAQYAYVLGELERRAKAGKRLAFVHLVEPRVTDPSLVEGEGEYSEGTNDFAYSIWKGPIIRAGNYALHPEVVREQVKDPRTLIGYGRFFISNPDLVYRLEEGLPLNKYDRSTFYTMSAEGYTDYPTYEEAVDLGWNKN

SEQ ID NO: 115 - DNA, 1200 bp, synthetic construct
  misc_feature 1..1200: note = ERED chimera of Old Yellow Enzyme
  source 1..1200: mol_type = other DNA
atgtctttcgttaaggacttcaagccgcaggcactgcgcgacaccaacctgttcgaacctattaaaattgggaacacacagctggctcatcgcgcggtaatgcctccgctgacccgcatgcgcgctacctttccgggcaacattccgaacaaggagtgggctgcggtttactacggccagcgtgcacagcgtccggggacaatgattatcacggaggcgacgttcatcagcccgcaggcaggtgggtacgataacaagcctggtgtttggtcagacgaacaggttgccgaatggaagaacatcttcctggctattcatgactgtcagtcatttgcgtgggtgcaactgcaggtcctgggctgggccgcctttccggataacctggcgcgtgatgggttacgttacgattctgcctccgataatgtgtatatgaatgcggaacaggaggaaaaagcgaaaaaagctaacaatccgcaacatagcattactaaagacgaaattaaacaatatgtcaaagaatatgttcaggcagctaagaactcgatcgctgcgggtgcggacggcgtggaaattcactcagccaacggttatctgttaaatcagttcctggatccgcacagcaacaaccgcaccgatgagtatgggggctcaattgaaaatcgtgcacgttttactctggaagtcgttgacgcggtggttgatgccatcggcccagaaaaagtgggtttacgtctgagtccgtacggcgttttcaactctatgtcgggcggcgcggaaacgggcattgttgctcagtatgcctatgtcctgggtgagctggagcgtcgcgccaaggcggggaaacgcctggcgtttgttcatttagtcgaaccacgcgtgacagacccttctctggttgagggggagggcgaatactcagagggcaccaacgattttgcttattccatttggaaaggtccgattatccgtgccggcaactacgcactacatcctgaagtagtgcgcgaacaagttaaggaccctcgcaccctgatcggctacggccgcttctttatttcaaatccagacctggtttaccgcttagaagaaggtctgccactgaacaagtatgaccgttctacgttctacaccatgagcgcggagggttacaccgactacccgacctacgaagaagccgtagatctgggctggaacaaaaac

SEQ ID NO: 116 - protein, 400 aa, synthetic construct
  REGION 1..400: note = ERED chimera of Old Yellow Enzyme
MSFVKDFKPQALRDTNLFEPIKIGNTQLAHRAVMPPLTRMRATFPGNIPNKEWAAVYYGQRAQRPGTMIITEATFISPQAGGYDNKPGVWSDEQVAEWKNIFLAIHDCQSFAWVQLQVLGWAAFPDNLARDGLRYDSASDNVYMNAEQEEKAKKANNPQHSITKDEIKQYVKEYVQAAKNSIAAGADGVEIHSANGYLLNQFLDPHSNNRTDEYGGSIENRARFTLEVVDAVVDAIGPEKVGLRLSPYGVFNSMSGGAETGIVAQYAYVLGELERRAKAGKRLAFVHLVEPRVTDPSLVEGEGEYSEGTNDFAYSIWKGPIIRAGNYALHPEVVREQVKDPRTLIGYGRFFISNPDLVYRLEEGLPLNKYDRSTFYTMSAEGYTDYPTYEEAVDLGWNKN

SEQ ID NO: 117 - DNA, 1200 bp, synthetic construct
  misc_feature 1..1200: note = ERED chimera of Old Yellow Enzyme
  source 1..1200: mol_type = other DNA
atgtctttcgttaaggacttcaagccgcaggcactgcgcgacaccaacctgttcgaacctattaaaattgggaacacacagctggctcatcgcgcggtaatgcctccgctgacccgcatgcgcgctacccatccgggcaacattccgaacaaggagtgggctgcggtttactacggccagcgtgcacagcgtccggggacaatgattatcacggaggcgacgttcatcagcccgcaggcaggtgggtacgataacaagcctggtgtttggtcagacgaacaggttgccgaatggaagaacatcttcgcggctattcatgactgtcagtcatttgcgtgggtgcaactgcaggtcctgggctgggccgcctttccggataacctggcgcgtgatgggttacgttacgattctgcctccgataatgtgtatatgaatgcggaacaggaggaaaaagcgaaaaaagctaacaatccgcaacatagcattactaaagacgaaattaaacaatatgtcaaagaatatgttcaggcagctaagaactcgatcgctgcgggtgcggacggcgtggaaattcactcagccaacggttatctgttaaatcagttcctggatccgcacagcaacaaccgcaccgatgagtatgggggctcaattgaaaatcgtgcacgttttactctggaagtcgttgacgcggtggttgatgccatcggcccagaaaaagtgggtttacgtctgagtccgtacggcgttttcaactctatgtcgggcggcgcggaaacgggcattgttgctcagtatgcctatgtcctgggtgagctggagcgtcgcgccaaggcggggaaacgcctggcgtttgttcatttagtcgaaccacgcgtgacagacccttctctggttgagggggagggcgaatactcagagggcaccaacgattttgcttattccatttggaaaggtccgattatccgtgccggcaactacgcactacatcctgaagtagtgcgcgaacaagttaaggaccctcgcaccctgatcggctacggccgcttctttatttcaaatccagacctggtttaccgcttagaagaaggtctgccactgaacaagtatgaccgttctacgttctacaccatgagcgcggagggttacaccgactacccgacctacgaagaagccgtagatctgggctggaacaaaaac

SEQ ID NO: 118 - protein, 400 aa, synthetic construct
  REGION 1..400: note = ERED chimera of Old Yellow Enzyme
MSFVKDFKPQALRDTNLFEPIKIGNTQLAHRAVMPPLTRMRATHPGNIPNKEWAAVYYGQRAQRPGTMIITEATFISPQAGGYDNKPGVWSDEQVAEWKNIFAAIHDCQSFAWVQLQVLGWAAFPDNLARDGLRYDSASDNVYMNAEQEEKAKKANNPQHSITKDEIKQYVKEYVQAAKNSIAAGADGVEIHSANGYLLNQFLDPHSNNRTDEYGGSIENRARFTLEVVDAVVDAIGPEKVGLRLSPYGVFNSMSGGAETGIVAQYAYVLGELERRAKAGKRLAFVHLVEPRVTDPSLVEGEGEYSEGTNDFAYSIWKGPIIRAGNYALHPEVVREQVKDPRTLIGYGRFFISNPDLVYRLEEGLPLNKYDRSTFYTMSAEGYTDYPTYEEAVDLGWNKN

SEQ ID NO: 119 - DNA, 1200 bp, synthetic construct
  misc_feature 1..1200: note = ERED chimera of Old Yellow Enzyme
  source 1..1200: mol_type = other DNA
atgtctttcgttaaggacttcaagccgcaggcactgcgcgacaccaacctgttcgaacctattaaaattgggaacacacagctggctcatcgcgcggtaatgcctccgctgacccgcatgcgcgctacccatccgggcaacattccgaacaaggagtgggctgcggtttactacggccagcgtgcacagcgtccggggacaatgattatcacggaggcgacgttcatcagcccgcaggcaggtgggtacgataacaagcctggtgtttggtcagacgaacaggttgccgaatggaagaacatcttcctggctattcatgactgtcagtcatttgcgtgggtgcaactgcaggtcctgggctgggccgcctttccggataacctggcgcgtgatgggttacgttacgattctgcctccgataatgtgtatatgaatgcggaacaggaggaaaaagcgaaaaaagctaacaatccgcaacatagcattactaaagacgaaattaaacaatatgtcaaagaatatgttcaggcagctaagaactcgatcgctgcgggtgcggacggcgtggaaattcactcagccaacggttatctgttaaatcagttcctggatccgcacagcaacaaccgcaccgatgagtatgggggctcaattgaaaatcgtgcacgttttactctggaagtcgttgacgcggtggttgatgccatcggcccagaaaaagtgggtttacgtctgagtccgtacggcgttttcaactctatgtcgggcggcgcggaaacgggcattgttgctcagtatgcctatgtcctgggtgagctggagcgtcgcgccaaggcggggaaacgcctggcgtttgttcatttagtcgaaccacgcgtgacagacccttctctggttgagggggagggcgaatactcagagggcaccaacgattttgcttattccatttggaaaggtccgattatccgtgccggcaactacgcactacatcctgaagtagtgcgcgaacaagttaaggaccctcgcaccctgatcggctacggccgcttctttatttcaaatccagacctggttgtgcgcttagaagaaggtctgccactgaacaagtatgaccgttctacgttctacaccatgagcgcggagggttacaccgactacccgacctacgaagaagccgtagatctgggctggaacaaaaac

SEQ ID NO: 120 - protein, 400 aa, synthetic construct
  REGION 1..400: note = ERED chimera of Old Yellow Enzyme
MSFVKDFKPQALRDTNLFEPIKIGNTQLAHRAVMPPLTRMRATHPGNIPNKEWAAVYYGQRAQRPGTMIITEATFISPQAGGYDNKPGVWSDEQVAEWKNIFLAIHDCQSFAWVQLQVLGWAAFPDNLARDGLRYDSASDNVYMNAEQEEKAKKANNPQHSITKDEIKQYVKEYVQAAKNSIAAGADGVEIHSANGYLLNQFLDPHSNNRTDEYGGSIENRARFTLEVVDAVVDAIGPEKVGLRLSPYGVFNSMSGGAETGIVAQYAYVLGELERRAKAGKRLAFVHLVEPRVTDPSLVEGEGEYSEGTNDFAYSIWKGPIIRAGNYALHPEVVREQVKDPRTLIGYGRFFISNPDLVVRLEEGLPLNKYDRSTFYTMSAEGYTDYPTYEEAVDLGWNKN

SEQ ID NO: 121 - DNA, 1200 bp, synthetic construct
  misc_feature 1..1200: note = ERED chimera of Old Yellow Enzyme
  source 1..1200: mol_type = other DNA
atgtctttcgttaaggacttcaagccgcaggcactgcgcgacaccaacctgttcgaacctattaaaattgggaacacacagctggctcatcgcgcggtaatgcctccgctgacccgcatgcgcgctacccatccgggcaacattccgaacaaggagtgggctgcggtttactacggccagcgtgcacagcgtccggggacaatgattatcacggaggcgacgttcatcagcccgcaggcaggtgggtacgataacaagcctggtgtttggtcagacgaacaggttgccgaatggaagaacatcttcctggctattcatcggtgtcagtcatttgcgtgggtgcaactgcaggtcctgggctgggccgcctttccggataacctggcgcgtgatgggttacgttacgattctgcctccgataatgtgtatatgaatgcggaacaggaggaaaaagcgaaaaaagctaacaatccgcaacatagcattactaaagacgaaattaaacaatatgtcaaagaatatgttcaggcagctaagaactcgatcgctgcgggtgcggacggcgtggaaattcactcagccaacggttatctgttaaatcagttcctggatccgcacagcaacaaccgcaccgatgagtatgggggctcaattgaaaatcgtgcacgttttactctggaagtcgttgacgcggtggttgatgccatcggcccagaaaaagtgggtttacgtctgagtccgtacggcgttttcaactctatgtcgggcggcgcggaaacgggcattgttgctcagtatgcctatgtcctgggtgagctggagcgtcgcgccaaggcggggaaacgcctggcgtttgttcatttagtcgaaccacgcgtgacagacccttctctggttgagggggagggcgaatactcagagggcaccaacgattttgcttattccatttggaaaggtccgattatccgtgccggcaactacgcactacatcctgaagtagtgcgcgaacaagttaaggaccctcgcaccctgatcggctacggccgcttctttatttcaaatccagacctggtttaccgcttagaagaaggtctgccactgaacaagtatgaccgttctacgttctacaccatgagcgcggagggttacaccgactacccgacctacgaagaagccgtagatctgggctggaacaaaaac

SEQ ID NO: 122 - protein, 400 aa, synthetic construct
  REGION 1..400: note = ERED chimera of Old Yellow Enzyme
MSFVKDFKPQALRDTNLFEPIKIGNTQLAHRAVMPPLTRMRATHPGNIPNKEWAAVYYGQRAQRPGTMIITEATFISPQAGGYDNKPGVWSDEQVAEWKNIFLAIHRCQSFAWVQLQVLGWAAFPDNLARDGLRYDSASDNVYMNAEQEEKAKKANNPQHSITKDEIKQYVKEYVQAAKNSIAAGADGVEIHSANGYLLNQFLDPHSNNRTDEYGGSIENRARFTLEVVDAVVDAIGPEKVGLRLSPYGVFNSMSGGAETGIVAQYAYVLGELERRAKAGKRLAFVHLVEPRVTDPSLVEGEGEYSEGTNDFAYSIWKGPIIRAGNYALHPEVVREQVKDPRTLIGYGRFFISNPDLVYRLEEGLPLNKYDRSTFYTMSAEGYTDYPTYEEAVDLGWNKN

SEQ ID NO: 123 - DNA, 1200 bp, synthetic construct
  misc_feature 1..1200: note = ERED chimera of Old Yellow Enzyme
  source 1..1200: mol_type = other DNA
atgtctttcgttaaggacttcaagccgcaggcactgcgcgacaccaacctgttcgaacctattaaaattgggaacacacagctggctcatcgcgcggtaatgcctccgctgacccgcatgcgcgctacccatccgggcaacattccgaacaaggagtgggctgcggtttactacggccagcgtgcacagcgtccggggacaatgattatcacggaggcgacgttcatcagcccgcaggcaggtgggtacgataacaagcctggtgtttggtcagacgaacaggttgccgaatggaagaacatcttccgtgctattcatgactgtcagtcatttgcgtgggtgcaactgcaggtcctgggctgggccgcctttccggataacctggcgcgtgatgggttacgttacgattctgcctccgataatgtgtatatgaatgcggaacaggaggaaaaagcgaaaaaagctaacaatccgcaacatagcattactaaagacgaaattaaacaatatgtcaaagaatatgttcaggcagctaagaactcgatcgctgcgggtgcggacggcgtggaaattcactcagccaacggttatctgttaaatcagttcctggatccgcacagcaacaaccgcaccgatgagtatgggggctcaattgaaaatcgtgcacgttttactctggaagtcgttgacgcggtggttgatgccatcggcccagaaaaagtgggtttacgtctgagtccgtacggcgttttcaactctatgtcgggcggcgcggaaacgggcattgttgctcagtatgcctatgtcctgggtgagctggagcgtcgcgccaaggcggggaaacgcctggcgtttgttcatttagtcgaaccacgcgtgacagacccttctctggttgagggggagggcgaatactcagagggcaccaacgattttgcttattccatttggaaaggtccgattatccgtgccggcaactacgcactacatcctgaagtagtgcgcgaacaagttaaggaccctcgcaccctgatcggctacggccgcttctttatttcaaatccagacctggtttaccgcttagaagaaggtctgccactgaacaagtatgaccgttctacgttctacaccatgagcgcggagggttacaccgactacccgacctacgaagaagccgtagatctgggctggaacaaaaac

SEQ ID NO: 124 - protein, 400 aa, synthetic construct
  REGION 1..400: note = ERED chimera of Old Yellow Enzyme
MSFVKDFKPQALRDTNLFEPIKIGNTQLAHRAVMPPLTRMRATHPGNIPNKEWAAVYYGQRAQRPGTMIITEATFISPQAGGYDNKPGVWSDEQVAEWKNIFRAIHDCQSFAWVQLQVLGWAAFPDNLARDGLRYDSASDNVYMNAEQEEKAKKANNPQHSITKDEIKQYVKEYVQAAKNSIAAGADGVEIHSANGYLLNQFLDPHSNNRTDEYGGSIENRARFTLEVVDAVVDAIGPEKVGLRLSPYGVFNSMSGGAETGIVAQYAYVLGELERRAKAGKRLAFVHLVEPRVTDPSLVEGEGEYSEGTNDFAYSIWKGPIIRAGNYALHPEVVREQVKDPRTLIGYGRFFISNPDLVYRLEEGLPLNKYDRSTFYTMSAEGYTDYPTYEEAVDLGWNKN

SEQ ID NO: 125 - DNA, 1200 bp, synthetic construct
  misc_feature 1..1200: note = ERED chimera of Old Yellow Enzyme
  source 1..1200: mol_type = other DNA
atgtctttcgttaaggacttcaagccgcaggcactgcgcgacaccaacctgttcgaacctattaaaattgggaacacacagctggctcatcgcgcggtaatgcctccgctgacccgcatgcgcgctacccatccgggcaacattccgaacaaggagtgggctgcggtttactacggccagcgtgcacagcgtccggggacaatgattatcacggaggcgacgttcatcagcccgcaggcaggtgggtacgataacaagcctggtgtttggtcagacgaacaggttgccgaatggaagaacatcttcacggctattcatgactgtcagtcatttgcgtgggtgcaactgcaggtcctgggctgggccgcctttccggataacctggcgcgtgatgggttacgttacgattctgcctccgataatgtgtatatgaatgcggaacaggaggaaaaagcgaaaaaagctaacaatccgcaacatagcattactaaagacgaaattaaacaatatgtcaaagaatatgttcaggcagctaagaactcgatcgctgcgggtgcggacggcgtggaaattcactcagccaacggttatctgttaaatcagttcctggatccgcacagcaacaaccgcaccgatgagtatgggggctcaattgaaaatcgtgcacgttttactctggaagtcgttgacgcggtggttgatgccatcggcccagaaaaagtgggtttacgtctgagtccgtacggcgttttcaactctatgtcgggcggcgcggaaacgggcattgttgctcagtatgcctatgtcctgggtgagctggagcgtcgcgccaaggcggggaaacgcctggcgtttgttcatttagtcgaaccacgcgtgacagacccttctctggttgagggggagggcgaatactcagagggcaccaacgattttgcttattccatttggaaaggtccgattatccgtgccggcaactacgcactacatcctgaagtagtgcgcgaacaagttaaggaccctcgcaccctgatcggctacggccgcttctttatttcaaatccagacctggtttaccgcttagaagaaggtctgccactgaacaagtatgaccgttctacgttctacaccatgagcgcggagggttacaccgactacccgacctacgaagaagccgtagatctgggctggaacaaaaac

SEQ ID NO: 126 - protein, 400 aa, synthetic construct
  REGION 1..400: note = ERED chimera of Old Yellow Enzyme
MSFVKDFKPQALRDTNLFEPIKIGNTQLAHRAVMPPLTRMRATHPGNIPNKEWAAVYYGQRAQRPGTMIITEATFISPQAGGYDNKPGVWSDEQVAEWKNIFTAIHDCQSFAWVQLQVLGWAAFPDNLARDGLRYDSASDNVYMNAEQEEKAKKANNPQHSITKDEIKQYVKEYVQAAKNSIAAGADGVEIHSANGYLLNQFLDPHSNNRTDEYGGSIENRARFTLEVVDAVVDAIGPEKVGLRLSPYGVFNSMSGGAETGIVAQYAYVLGELERRAKAGKRLAFVHLVEPRVTDPSLVEGEGEYSEGTNDFAYSIWKGPIIRAGNYALHPEVVREQVKDPRTLIGYGRFFISNPDLVYRLEEGLPLNKYDRSTFYTMSAEGYTDYPTYEEAVDLGWNKN

SEQ ID NO: 127 - DNA, 1200 bp, synthetic construct
  misc_feature 1..1200: note = ERED chimera of Old Yellow Enzyme
  source 1..1200: mol_type = other DNA
atgtctttcgttaaggacttcaagccgcaggcactgcgcgacaccaacctgttcgaacctattaaaattgggaacacacagctggctcatcgcgcggtaatgcctccgctgacccgcatgcgcgctacccatccgggcaacattccgaacaaggagtgggctgcggtttactacggccagcgtgcacagcgtccggggacaatgattatcacggaggcgacgttcatcagcccgcaggcaggtgggtacgataacaagcctggtgtttggtcagacgaacaggttgccgaatggaagaacatcttcctggctattcataattgtcagtcatttgcgtgggtgcaactgcaggtcctgggctgggccgcctttccggataacctggcgcgtgatgggttacgttacgattctgcctccgataatgtgtatatgaatgcggaacaggaggaaaaagcgaaaaaagctaacaatccgcaacatagcattactaaagacgaaattaaacaatatgtcaaagaatatgttcaggcagctaagaactcgatcgctgcgggtgcggacggcgtggaaattcactcagccaacggttatctgttaaatcagttcctggatccgcacagcaacaaccgcaccgatgagtatgggggctcaattgaaaatcgtgcacgttttactctggaagtcgttgacgcggtggttgatgccatcggcccagaaaaagtgggtttacgtctgagtccgtacggcgttttcaactctatgtcgggcggcgcggaaacgggcattgttgctcagtatgcctatgtcctgggtgagctggagcgtcgcgccaaggcggggaaacgcctggcgtttgttcatttagtcgaaccacgcgtgacagacccttctctggttgagggggagggcgaatactcagagggcaccaacgattttgcttattccatttggaaaggtccgattatccgtgccggcaactacgcactacatcctgaagtagtgcgcgaacaagttaaggaccctcgcaccctgatcggctacggccgcttctttatttcaaatccagacctggtttaccgcttagaagaaggtctgccactgaacaagtatgaccgttctacgttctacaccatgagcgcggagggttacaccgactacccgacctacgaagaagccgtagatctgggctggaacaaaaac

SEQ ID NO: 128 - protein, 400 aa, synthetic construct
  REGION 1..400: note = ERED chimera of Old Yellow Enzyme
MSFVKDFKPQALRDTNLFEPIKIGNTQLAHRAVMPPLTRMRATHPGNIPNKEWAAVYYGQRAQRPGTMIITEATFISPQAGGYDNKPGVWSDEQVAEWKNIFLAIHNCQSFAWVQLQVLGWAAFPDNLARDGLRYDSASDNVYMNAEQEEKAKKANNPQHSITKDEIKQYVKEYVQAAKNSIAAGADGVEIHSANGYLLNQFLDPHSNNRTDEYGGSIENRARFTLEVVDAVVDAIGPEKVGLRLSPYGVFNSMSGGAETGIVAQYAYVLGELERRAKAGKRLAFVHLVEPRVTDPSLVEGEGEYSEGTNDFAYSIWKGPIIRAGNYALHPEVVREQVKDPRTLIGYGRFFISNPDLVYRLEEGLPLNKYDRSTFYTMSAEGYTDYPTYEEAVDLGWNKN

SEQ ID NO: 129 - DNA, 1200 bp, synthetic construct
  misc_feature 1..1200: note = ERED chimera of Old Yellow Enzyme
  source 1..1200: mol_type = other DNA
atgtctttcgttaaggacttcaagccgcaggcactgcgcgacaccaacctgttcgaacctattaaaattgggaacacacagctggctcatcgcgcggtaatgcctccgctgacccgcatgcgcgctacccatccgggcaacattccgaacaaggagtgggctgcgatgtactacggccagcgtgcacagcgtccggggacaatgattatcacggaggcgacgttcatcagcccgcaggcaggtgggtacgataacaagcctggtgtttggtcagacgaacaggttgccgaatggaagaacatcttcctggctattcatgactgtcagtcatttgcgtgggtgcaactgcaggtcctgggctgggccgcctttccggataacctggcgcgtgatgggttacgttacgattctgcctccgataatgtgtatatgaatgcggaacaggaggaaaaagcgaaaaaagctaacaatccgcaacatagcattactaaagacgaaattaaacaatatgtcaaagaatatgttcaggcagctaagaactcgatcgctgcgggtgcggacggcgtggaaattcactcagccaacggttatctgttaaatcagttcctggatccgcacagcaacaaccgcaccgatgagtatgggggctcaattgaaaatcgtgcacgttttactctggaagtcgttgacgcggtggttgatgccatcggcccagaaaaagtgggtttacgtctgagtccgtacggcgttttcaactctatgtcgggcggcgcggaaacgggcattgttgctcagtatgcctatgtcctgggtgagctggagcgtcgcgccaaggcggggaaacgcctggcgtttgttcatttagtcgaaccacgcgtgacagacccttctctggttgagggggagggcgaatactcagagggcaccaacgattttgcttattccatttggaaaggtccgattatccgtgccggcaactacgcactacatcctgaagtagtgcgcgaacaagttaaggaccctcgcaccctgatcggctacggccgcttctttatttcaaatccagacctggtttaccgcttagaagaaggtctgccactgaacaagtatgaccgttctacgttctacaccatgagcgcggagggttacaccgactacccgacctacgaagaagccgtagatctgggctggaacaaaaac

SEQ ID NO: 130 - protein, 400 aa, synthetic construct
  REGION 1..400: note = ERED chimera of Old Yellow Enzyme
MSFVKDFKPQALRDTNLFEPIKIGNTQLAHRAVMPPLTRMRATHPGNIPNKEWAAMYYGQRAQRPGTMIITEATFISPQAGGYDNKPGVWSDEQVAEWKNIFLAIHDCQSFAWVQLQVLGWAAFPDNLARDGLRYDSASDNVYMNAEQEEKAKKANNPQHSITKDEIKQYVKEYVQAAKNSIAAGADGVEIHSANGYLLNQFLDPHSNNRTDEYGGSIENRARFTLEVVDAVVDAIGPEKVGLRLSPYGVFNSMSGGAETGIVAQYAYVLGELERRAKAGKRLAFVHLVEPRVTDPSLVEGEGEYSEGTNDFAYSIWKGPIIRAGNYALHPEVVREQVKDPRTLIGYGRFFISNPDLVYRLEEGLPLNKYDRSTFYTMSAEGYTDYPTYEEAVDLGWNKN

SEQ ID NO: 131 - DNA, 1200 bp, synthetic construct
  misc_feature 1..1200: note = ERED chimera of Old Yellow Enzyme
  source 1..1200: mol_type = other DNA
atgtctttcgttaaggacttcaagccgcaggcactgcgcgacaccaacctgttcgaacctattaaaattgggaacacacagctggctcatcgcgcggtaatgcctccgctgacccgcatgcgcgctacccatccgggcaacattccgaacaaggagtgggctgcggtttactacggccagcgtgcacagcgtccggggacaatgattatcacggaggcgacgttcatcagcccgcaggcaggtgggtacgataacaagcctggtgtttggtcagacgaacaggttgccgaatggaagaacatcttcctggctattcatcagtgtcagtcatttgcgtgggtgcaactgcaggtcctgggctgggccgcctttccggataacctggcgcgtgatgggttacgttacgattctgcctccgataatgtgtatatgaatgcggaacaggaggaaaaagcgaaaaaagctaacaatccgcaacatagcattactaaagacgaaattaaacaatatgtcaaagaatatgttcaggcagctaagaactcgatcgctgcgggtgcggacggcgtggaaattcactcagccaacggttatctgttaaatcagttcctggatccgcacagcaacaaccgcaccgatgagtatgggggctcaattgaaaatcgtgcacgttttactctggaagtcgttgacgcggtggttgatgccatcggcccagaaaaagtgggtttacgtctgagtccgtacggcgttttcaactctatgtcgggcggcgcggaaacgggcattgttgctcagtatgcctatgtcctgggtgagctggagcgtcgcgccaaggcggggaaacgcctggcgtttgttcatttagtcgaaccacgcgtgacagacccttctctggttgagggggagggcgaatactcagagggcaccaacgattttgcttattccatttggaaaggtccgattatccgtgccggcaactacgcactacatcctgaagtagtgcgcgaacaagttaaggaccctcgcaccctgatcggctacggccgcttctttatttcaaatccagacctggtttaccgcttagaagaaggtctgccactgaacaagtatgaccgttctacgttctacaccatgagcgcggagggttacaccgactacccgacctacgaagaagccgtagatctgggctggaacaaaaac

SEQ ID NO: 132 - protein, 400 aa, synthetic construct
  REGION 1..400: note = ERED chimera of Old Yellow Enzyme
MSFVKDFKPQALRDTNLFEPIKIGNTQLAHRAVMPPLTRMRATHPGNIPNKEWAAVYYGQRAQRPGTMIITEATFISPQAGGYDNKPGVWSDEQVAEWKNIFLAIHQCQSFAWVQLQVLGWAAFPDNLARDGLRYDSASDNVYMNAEQEEKAKKANNPQHSITKDEIKQYVKEYVQAAKNSIAAGADGVEIHSANGYLLNQFLDPHSNNRTDEYGGSIENRARFTLEVVDAVVDAIGPEKVGLRLSPYGVFNSMSGGAETGIVAQYAYVLGELERRAKAGKRLAFVHLVEPRVTDPSLVEGEGEYSEGTNDFAYSIWKGPIIRAGNYALHPEVVREQVKDPRTLIGYGRFFISNPDLVYRLEEGLPLNKYDRSTFYTMSAEGYTDYPTYEEAVDLGWNKN

SEQ ID NO: 133 - DNA, 1200 bp, synthetic construct
  misc_feature 1..1200: note = ERED chimera of Old Yellow Enzyme
  source 1..1200: mol_type = other DNA
atgtctttcgttaaggacttcaagccgcaggcactgcgcgacaccaacctgttcgaacctattaaaattgggaacacacagctggctcatcgcgcggtaatgcctccgctgacccgcatgcgcgctacccatccgggcaacattccgaacaaggagtgggctgcggtttactacggccagcgtgcacagcgtccggggacaatgattatcacggaggcgacgttcatcagcccgcaggcaggtgggtacgataacaagcctggtgtttggtcagacgaacaggttgccgaatggaagaacatcttcctggctattcatgactgtcagtcatttgcgtgggtgcaactgcaggtcctgggctgggccgcctttccggataacctggcgcgtgatgggttacgttacgattctgcctccgataatgtgtatatgaatgcggaacaggaggaaaaagcgaaaaaagctaacaatccgcaacatagcattactaaagacgaaattaaacaatatgtcaaagaatatgttcaggcagctaagaactcgatcgctgcgggtgcggacggcgtggaaattcactcagccaacggttatctgttaaatcagttcctggatccgcacagcaacaaccgcaccgatgagtatgggggctcaattgaaaatcgtgcacgttttactctggaagtcgttgacgcggtggttgatgccatcggcccagaaaaagtgggtttacgtctgagtccgtacggcaggttcaactctatgtcgggcggcgcggaaacgggcattgttgctcagtatgcctatgtcctgggtgagctggagcgtcgcgccaaggcggggaaacgcctggcgtttgttcatttagtcgaaccacgcgtgacagacccttctctggttgagggggagggcgaatactcagagggcaccaacgattttgcttattccatttggaaaggtccgattatccgtgccggcaactacgcactacatcctgaagtagtgcgcgaacaagttaaggaccctcgcaccctgatcggctacggccgcttctttatttcaaatccagacctggtttaccgcttagaagaaggtctgccactgaacaagtatgaccgttctacgttctacaccatgagcgcggagggttacaccgactacccgacctacgaagaagccgtagatctgggctggaacaaaaac

SEQ ID NO: 134 - protein, 400 aa, synthetic construct
  REGION 1..400: note = ERED chimera of Old Yellow Enzyme
MSFVKDFKPQALRDTNLFEPIKIGNTQLAHRAVMPPLTRMRATHPGNIPNKEWAAVYYGQRAQRPGTMIITEATFISPQAGGYDNKPGVWSDEQVAEWKNIFLAIHDCQSFAWVQLQVLGWAAFPDNLARDGLRYDSASDNVYMNAEQEEKAKKANNPQHSITKDEIKQYVKEYVQAAKNSIAAGADGVEIHSANGYLLNQFLDPHSNNRTDEYGGSIENRARFTLEVVDAVVDAIGPEKVGLRLSPYGRFNSMSGGAETGIVAQYAYVLGELERRAKAGKRLAFVHLVEPRVTDPSLVEGEGEYSEGTNDFAYSIWKGPIIRAGNYALHPEVVREQVKDPRTLIGYGRFFISNPDLVYRLEEGLPLNKYDRSTFYTMSAEGYTDYPTYEEAVDLGWNKN

SEQ ID NO: 135 - DNA, 1200 bp, synthetic construct
  misc_feature 1..1200: note = Variant of ERED chimera of Old Yellow Enzyme
  source 1..1200: mol_type = other DNA
atgtctttcgttaaggacttcaagccgcaagcactgcgcgacaccaacctgttcgaacctattaaaattgggaacacacagctggctcatcgcgctgtaatgcctccgctgacccgcatgcgcgctacccatccgggcaacattccgaacaaggagtgggctgcggtttactacggccagcgtgcacagcgtccggggacaatgattatcacggaggcgacgttcatcagcccgcaggcaggtgggtacgataacaagcctggtgtttggtcagacgaacaggttgccgaatggaagaacatcttcggcgctattcatgactgtggctcatttgcgtgggtgcaactgcaggtcctgggctgggccgcctttccggataccctggcgcgtgatgggttacgttacgattctgcctccgataatgtgtatatgaatgcggaacaggaagaaaaagcgaaacgcgctaacaatccgcaacatagcattactaaagacgaaattcaacaatatgtcaaagaatatgttcaggcagctaagaactcgatcggtgcgggtgcggacggcgtggaaattcactcagccaacggttatctgttaaatcagttcctggatccgcacagcaacaaccgcaccgatgagtatgggggctcaattgaaaatcgtgcacgttttactctggaagtcgttgacgcggtggttgatgccatcggcccagaaaaagtgggtttacgtctgagtccgtacggcacgttcaactctatgtcgggcggcgcggaaacgggcattgttgctcagtatgcctatgtcctgggtgagctggagcgtcgcgccaaggcggggaaacgcctggcgtttgttcatttagtcgaaccacgcgtgacagacccttctctggttgagggggagggcgaatactcagagggcactaacgattttgcttattccatttggaaaggtccgattatccgtgccggcaactatgcactacatcctgaagtagtgcgcgaacaagttaaggaccgtcgcaccctgatcggctacggccgcttctttatttcaaatccagacctggtttaccgcttagaagaaggtctgccactgaacaagtatgaccgttctacgttctacaccatgagcgcggagggttacatcgactacccgacctacgaagaagccgtagatctgggctgggagaaaaac

SEQ ID NO: 136 - protein, 400 aa, synthetic construct
  REGION 1..400: note = Variant of ERED chimera of Old Yellow Enzyme
MSFVKDFKPQALRDTNLFEPIKIGNTQLAHRAVMPPLTRMRATHPGNIPNKEWAAVYYGQRAQRPGTMIITEATFISPQAGGYDNKPGVWSDEQVAEWKNIFGAIHDCGSFAWVQLQVLGWAAFPDTLARDGLRYDSASDNVYMNAEQEEKAKRANNPQHSITKDEIQQYVKEYVQAAKNSIGAGADGVEIHSANGYLLNQFLDPHSNNRTDEYGGSIENRARFTLEVVDAVVDAIGPEKVGLRLSPYGTFNSMSGGAETGIVAQYAYVLGELERRAKAGKRLAFVHLVEPRVTDPSLVEGEGEYSEGTNDFAYSIWKGPIIRAGNYALHPEVVREQVKDRRTLIGYGRFFISNPDLVYRLEEGLPLNKYDRSTFYTMSAEGYIDYPTYEEAVDLGWEKN

SEQ ID NO: 137 - DNA, 1200 bp, synthetic construct
  misc_feature 1..1200: note = Variant of ERED chimera of Old Yellow Enzyme
  source 1..1200: mol_type = other DNA
atgtctttcgttaaggacttcaagccgcaagcactgcgcgacaccaacctgttcgaacctattaaaattgggaacacacagctggctcatcgcgctgtaatgcctccgctgacccgcatgcgcgctacccatccgggcaacattccgaacaaggagtgggctgcggtttactacggccagcgtgcacagcgtccggggacaatgattatcacggaggcgacgttcatcagcccgcaggcaggtgggtacgataacaagcctggtgtttggtcagacgaacaggttgccgaatggaagaacatcttcctggctattcatgactgtcaatcatttgcgtgggtgcaactgcaggtcctgggctgggccgcctttccggataccctggcgcgtgatgggttacgttacgattctgcctccgataatgtgtatatgaatgcggaacaggaggaaaaagcgaaaaaagctaacaatccgcaacatagcattactaaagacgaaattaaacaatatgtcaaagaatatgttcaggcagctaagaactcgatcggtgcgggtgcggacggcgtggaaattcactcagccaacggttatctgttaaatcagttcctggatccgcacagcaacaaccgcaccgatgagtatgggggctcaattgaaaatcgtgcacgttttactctggaagtcgttgacgcggtggttgatgccatcggcccagaaaaagtgggtttacgtctgagtccgtacggcacgttcaactctatgtcgggcggcgcggaaacgggcattgttgctcagtatgcctatgtcctgggtgagctggagcgtcgcgccaaggcggggaaacgcctggcgtttgttcatttagtcgaaccacgcgtgacagacccttctctggttgagggggagggcgaatactcagagggcactaacgattttgcttattccatttggaaaggtccgattatccgtgccggcaactatgcactacatcctgaagtagtgcgcgaacaagttaaggaccgtcgcaccctgatcggctacggccgcttctttatttcaaatccagacctggtttaccgcttagaagaaggtctgccactgaacaagtatgaccgttctacgttctacaccatgagcgcggagggttacatcgactacccgacctacgaagaagccgtagatctgggctggaatgaaaac

SEQ ID NO: 138 - protein, 400 aa, synthetic construct
  REGION 1..400: note = Variant of ERED chimera of Old Yellow Enzyme
MSFVKDFKPQALRDTNLFEPIKIGNTQLAHRAVMPPLTRMRATHPGNIPNKEWAAVYYGQRAQRPGTMIITEATFISPQAGGYDNKPGVWSDEQVAEWKNIFLAIHDCQSFAWVQLQVLGWAAFPDTLARDGLRYDSASDNVYMNAEQEEKAKKANNPQHSITKDEIKQYVKEYVQAAKNSIGAGADGVEIHSANGYLLNQFLDPHSNNRTDEYGGSIENRARFTLEVVDAVVDAIGPEKVGLRLSPYGTFNSMSGGAETGIVAQYAYVLGELERRAKAGKRLAFVHLVEPRVTDPSLVEGEGEYSEGTNDFAYSIWKGPIIRAGNYALHPEVVREQVKDRRTLIGYGRFFISNPDLVYRLEEGLPLNKYDRSTFYTMSAEGYIDYPTYEEAVDLGWNEN

SEQ ID NO: 139 - DNA, 1200 bp, synthetic construct
  misc_feature 1..1200: note = Variant of ERED chimera of Old Yellow Enzyme
  source 1..1200: mol_type = other DNA
atgtctttcgttaaggacttcaagccgcaagcactgcgcgacaccaacctgttcgaacctattaaaattgggaacacacagctggctcatcgcgctgtaatgcctccgctgacccgcatgcgcgctacccatccgggcaacattccgaacaaggagtgggctgcggtttactacggccagcgtgcacagcgtccggggacaatgattatcacggaggcgacgttcatcagcccgcaggcaggtgggtacgataacaagcctggtgtttggtcagacgaacaggttgccgaatggaagaacatcttcctggctattcatgactgtcaatcatttgcgtgggtgcaactgcaggtcctgggctgggccgcctttccggataccctggcgcgtgatgggttacgttacgattctgcctccgataatgtgtatatgaatgcggaacaggaggaaaaagcgaaaaaagctaacaatccgcaacatagcattactaaagacgaaattaaacaatatgtcaaagaatatgttcaggcagctaagaactcgatcggtgcgggtgcggacggcgtggaaattcactcagccaacggttatctgttaaatcagttcctggatccgcacagcaacaaccgcaccgatgagtatgggggctcaattgaaaatcgtgcacgttttactctggaagtcgttgacgcggtggttgatgccatcggcccagaaaaagtgggtttacgtctgagtccgtacggcacgttcaactctatgtcgggcggcgcggaaacgggcattgttgctcagtatgcctatgtcctgggtgagctggagcgtcgcgccaaggcggggaaacgcctggcgtttgttcatttagtcgaaccacgcgtgacagacccttctctggttgagggggagggcgaatactcagagggcactaacgattttgcttattccatttggaaaggtccgattatccgtgccggcaactatgcactacatcctgaagtagtgcgcgaacaagttaaggaccctcgcaccctgatcggctacggccgcttctttatttcaaatccagacctggtttaccgcttagaagaaggtctgccactgaacaagtatgaccgttctacgttctacaccatgagcgcggagggttacatcgactacccgacctacgaagaagccgtagatctgggctggaacaaaaac

SEQ ID NO: 140 - protein, 400 aa, synthetic construct
  REGION 1..400: note = Variant of ERED chimera of Old Yellow Enzyme
MSFVKDFKPQALRDTNLFEPIKIGNTQLAHRAVMPPLTRMRATHPGNIPNKEWAAVYYGQRAQRPGTMIITEATFISPQAGGYDNKPGVWSDEQVAEWKNIFLAIHDCQSFAWVQLQVLGWAAFPDTLARDGLRYDSASDNVYMNAEQEEKAKKANNPQHSITKDEIKQYVKEYVQAAKNSIGAGADGVEIHSANGYLLNQFLDPHSNNRTDEYGGSIENRARFTLEVVDAVVDAIGPEKVGLRLSPYGTFNSMSGGAETGIVAQYAYVLGELERRAKAGKRLAFVHLVEPRVTDPSLVEGEGEYSEGTNDFAYSIWKGPIIRAGNYALHPEVVREQVKDPRTLIGYGRFFISNPDLVYRLEEGLPLNKYDRSTFYTMSAEGYIDYPTYEEAVDLGWNKN

SEQ ID NO: 141 - DNA, 1200 bp, synthetic construct
  misc_feature 1..1200: note = Variant of ERED chimera of Old Yellow Enzyme
  source 1..1200: mol_type = other DNA
atgtctttcgttaaggacttcaagccgcaagcactgcgcgacaccaacctgttcgaacctattaaaattgggaacacacagctggctcatcgcgtcgtaatgcctccgctgacccgcatgcgcgctacctacccgggcaacattccgaacaaggagtgggctgcggtttactacggccagcgtgcacagcgtccggggacaatgattatcacggaggcgacgttcatcagcccgcaggcaggtgggtacgataacaagcctggtgtttggtcagacgaacaggttgccgaatggaagaacatcttccgtgctattcatgagtgtcagtcatttgcgtgggtgcaactgcaggtcctgggctgggccgccagcccggataacctggcgcgtgatgggttacgttacgattctgcctccgataatgtgtatatgaatgcggaacaggaggaaaaagcgaaaaaagctaacaatccgcaacatagcattactaaagacgaaattaaacaatatgtcaaagaatatgttcaggcagctaagaactcgatcgaggcgggtgcggacggcgtggaaattcactcagccaacggttatctgttaaatcagttcctggatccgcacagcaacaaccgcaccgatgagtatgggggctcaattgaaaatcgtgcacgttttactctggaagtcgttgacgcggtggttgatgccatcggcccagaaaaagtgggtttacgtctgagtccgtacggcacgttcaactctatgtcgggcggcgcggaaacgggcattgttgctcagtatgcctatgtcctgggtgagctggagcgtcgcgccaaggcggggaaacgcctggcgtttgttcatttagtcgaaccacgcgtgacagacccttctctggttgagggggagggcgaatactcagagggcactaacgattttgcttattccatttggaaaggtccgattatccgtgccggcaactatgcactacatcctgaagtagtgcgcgaacaagttaaggaccctcgcaccctgatcggctacggccgcttctttatttcaaatccagacctggtttaccgcttagaagaaggtctgccactgaacaagtatgaccgttctacgttctacaccatgagcgcggagggttacatcgactacccgacctacgaagaagccgtagatctgggctggaacaaaaac

SEQ ID NO: 142 - protein, 400 aa, synthetic construct
  REGION 1..400: note = Variant of ERED chimera of Old Yellow Enzyme
MSFVKDFKPQALRDTNLFEPIKIGNTQLAHRVVMPPLTRMRATYPGNIPNKEWAAVYYGQRAQRPGTMIITEATFISPQAGGYDNKPGVWSDEQVAEWKNIFRAIHECQSFAWVQLQVLGWAASPDNLARDGLRYDSASDNVYMNAEQEEKAKKANNPQHSITKDEIKQYVKEYVQAAKNSIEAGADGVEIHSANGYLLNQFLDPHSNNRTDEYGGSIENRARFTLEVVDAVVDAIGPEKVGLRLSPYGTFNSMSGGAETGIVAQYAYVLGELERRAKAGKRLAFVHLVEPRVTDPSLVEGEGEYSEGTNDFAYSIWKGPIIRAGNYALHPEVVREQVKDPRTLIGYGRFFISNPDLVYRLEEGLPLNKYDRSTFYTMSAEGYIDYPTYEEAVDLGWNKN

SEQ ID NO: 143 - DNA, 1200 bp, synthetic construct
  misc_feature 1..1200: note = Variant of ERED chimera of Old Yellow Enzyme
  source 1..1200: mol_type = other DNA
atgtctttcgttaaggacttcaagccgcaagcactgcgcgacaccaacctgttcgaacctattaaaattgggaacacacagctggctcatcgcgtcgtaatgcctccgctgacccgcatgcgcgctacccatccgggcaacattccgaacaaggagtgggctgcggtttactacggccagcgtgcacagcgtccggggacaatgattatcacggaggcgacgttcatcagcccgcaggcaggtgggtacgataacaagcctggtgtttggtcagacgaacaggttgccgaatggaagaacatcttccgtgctattcatgagtgtcagtcatttgcgtgggtgcaactgcaggtcctgggctgggccgccagcccggataccctggcgcgtgatgggttacgttacgattctgcctccgataatgtgtatatgaatgcggaacaggaggaaaaagcgaaaaaagctaacaatccgcaacatagcattactaaagacgaaattaaacaatatgtcaaagaatatgttcaggcagctaagaactcgatcgcggcgggtgcggacggcgtggaaattcactcagccaacggttatctgttaaatcagttcctggatccgcacagcaaccgccgcaccgatgagtatgggggctcaattgaaaatcgtgcacgttttactctggaagtcgttgacgcggtggttgatgccatcggcccagaaaaagtgggtttacgtctgagtccgtacggcactttcaactctatgtcgggcggcgcggaaactggcattgttgctcagtatgcctatgtcctgggtgagctggagcgtcgcgccaaggcggggaaacgcctggcgtttgttcatttagtcgaaccacgcgtgacagacccttctctggttgagggggagggcgaatactcagagggcactaacgattttgcttattccatttggaaaggtccgattatccgtgccggcaactatgcactacatcctgaagtagtgcgcgaacaagttaaggacccgcgcaccctgatcggctacggccgcttctttatttcaaatccagacctggtttaccgcttagaagaaggtctgccactgaacaagtatgaccgttctacgttctacaccatgagcgcggagggttacatcgactacccgacctacgaagaagccgtagaactgggctggaacaaaaac

SEQ ID NO: 144 - protein, 400 aa, synthetic construct
  REGION 1..400: note = Variant of ERED chimera of Old Yellow Enzyme
MSFVKDFKPQALRDTNLFEPIKIGNTQLAHRVVMPPLTRMRATHPGNIPNKEWAAVYYGQRAQRPGTMIITEATFISPQAGGYDNKPGVWSDEQVAEWKNIFRAIHECQSFAWVQLQVLGWAASPDTLARDGLRYDSASDNVYMNAEQEEKAKKANNPQHSITKDEIKQYVKEYVQAAKNSIAAGADGVEIHSANGYLLNQFLDPHSNRRTDEYGGSIENRARFTLEVVDAVVDAIGPEKVGLRLSPYGTFNSMSGGAETGIVAQYAYVLGELERRAKAGKRLAFVHLVEPRVTDPSLVEGEGEYSEGTNDFAYSIWKGPIIRAGNYALHPEVVREQVKDPRTLIGYGRFFISNPDLVYRLEEGLPLNKYDRSTFYTMSAEGYIDYPTYEEAVELGWNKN

SEQ ID NO: 145 - DNA, 1200 bp, synthetic construct
  misc_feature 1..1200: note = Variant of ERED chimera of Old Yellow Enzyme
  source 1..1200: mol_type = other DNA
atgtctttcgttaaggacttcaagccgcaagcactgcgcgacaccaacctgttcgaacctattaaaattgggaacacacagctggctcatcgcgttgtaatgcctccgctgacccgcatgcgcgctacccatccgggcaacattccgaacaaggagtgggctgcggtttactacggccagcgtgcacagcgtccggggacaatgattatcacggaggcgacgttcatcagcccgcaggcaggtgggtacgataacaagcctggtgtttggtcagacgaacaggttgccgaatggaagaacatcttcctggctattcatgactgtcagtcatttgcgtgggtgcaactgcaggtcctgggctgggccgcctttccggataccctggcgcgtgatgggttacgttacgattctgcctccgataatgtgtatatgaatgcggaaatggaggaaaaagcgaaaaaagctaacaatccgcaacatagcattactaaagacgaaattaaacaatatgtcaaagaatatgttcaggcagctaagaactcgatcgctgcgggtgcggacggcgtggaaattcactcagccaacggttatctgttaaatcagttcctggatccgcacagcaacaaccgcaccgatgagtatgggggctcaattgaaaatcgtgcacgttttactctggaagtcgttgacgcggtggttgatgccatcggcccagaaaaagtgggtttacgtctgagtccgtacggcacgttcaactctatgtcgggcggcgcggaaacgggcattgttgctcagtatgcctatgtcctgggtgagctggagcgtcgcgccaaggcggggaaacgcctggcgtttgttcatttagtcgaaccacgcgtgacagacccttctctggttgagggggagggcgaatactcagagggcactaacgattttgcttattccatttggaaaggtccgattatccgtgccggcaactatgcactacatcctgaagtagtgcgcgaacaagttaaggaccctcgcaccctgatcggctacggccgcttctttatttcaaatccagacctggtttaccgcttagaagaaggtctgccactgaacaagtatgaccgttctacgttctacaccatgagcgcggagggttacatcgactacccgacctacgaagaagccgtagatctgggctggaacaaaaac

SEQ ID NO: 146 - protein, 400 aa, synthetic construct
  REGION 1..400: note = Variant of ERED chimera of Old Yellow Enzyme
MSFVKDFKPQALRDTNLFEPIKIGNTQLAHRVVMPPLTRMRATHPGNIPNKEWAAVYYGQRAQRPGTMIITEATFISPQAGGYDNKPGVWSDEQVAEWKNIFLAIHDCQSFAWVQLQVLGWAAFPDTLARDGLRYDSASDNVYMNAEMEEKAKKANNPQHSITKDEIKQYVKEYVQAAKNSIAAGADGVEIHSANGYLLNQFLDPHSNNRTDEYGGSIENRARFTLEVVDAVVDAIGPEKVGLRLSPYGTFNSMSGGAETGIVAQYAYVLGELERRAKAGKRLAFVHLVEPRVTDPSLVEGEGEYSEGTNDFAYSIWKGPIIRAGNYALHPEVVREQVKDPRTLIGYGRFFISNPDLVYRLEEGLPLNKYDRSTFYTMSAEGYIDYPTYEEAVDLGWNKN

SEQ ID NO: 147 - DNA, 1200 bp, synthetic construct
  misc_feature 1..1200: note = Variant of ERED chimera of Old Yellow Enzyme
  source 1..1200: mol_type = other DNA
atgtctttcgttaaggacttcaagccgcaagcactgcgcgacaccaacctgttcgaacctattaaaattgggaacacacagctggctcatcgcgttgtaatgcctccgctgtctcgcatgcgcgctacccatccgggcaacattccgaacaaggagtgggctgcggtttactacggccagcgtgcacagcgtccggggacaatgattatcacggaggcgacgttcatcagcccgcaggcaggtgggtacgataacaagcctggtgtttggtcagacgaacaggttgccgaatggaagaacatcttcctggctattcatgactgtcagtcatttgcgtgggtgcaactgcaggtcctgggctgggccgcctttccggataccctggcgcgtgatgggttacgttacgattctgcctccgataatgtgtatatgaatgcggaacaggaggaaaaagcgaaaaaagctaacaatccgcaacatagcattactaaagacgaaattaaacaatatgtcaaagaatatgttcaggcagctaagaactcgatcgctgcgggtgcggacggcgtggaaattcactcagccaacggttatctgttaaatcagttcctggatccgcacagcaacaaccgcaccgatgagtatgggggctcaattgaaaatcgtgcacgttttactctggaagtcgttgacgcggtggttgatgccatcggcccagaaaaagtgggtttacgtctgagtccgtacggcacgttcaactctatgtcgggcggcgcggaaacgggcattgttgctcagtatgcctatgtcctgggtgagctggagcgtcgcgccaaggcggggaaacgcctggcgtttgttcatttagtcgaaccacgcgtgacagacccttctctggttgagggggagggcgaatactcagagggcactaacgattttgcttattccatttggaaaggtccgattatccgtgccggcaactatgcactacatcctgaagtagtgcgcgaacaagttaaggaccctcgcaccctgatcggctacggccgcttctttatttcaaatccagacctggtttaccgcttagaagaaggtctgccactgaacaagtatgaccgttctacgttctacaccatgagcgcggagggttacatcgactacccgacctacgaagaagccgtagatctgggctggaacaaaaac

SEQ ID NO: 148 - protein, 400 aa, synthetic construct
  REGION 1..400: note = Variant of ERED chimera of Old Yellow Enzyme
MSFVKDFKPQALRDTNLFEPIKIGNTQLAHRVVMPPLSRMRATHPGNIPNKEWAAVYYGQRAQRPGTMIITEATFISPQAGGYDNKPGVWSDEQVAEWKNIFLAIHDCQSFAWVQLQVLGWAAFPDTLARDGLRYDSASDNVYMNAEQEEKAKKANNPQHSITKDEIKQYVKEYVQAAKNSIAAGADGVEIHSANGYLLNQFLDPHSNNRTDEYGGSIENRARFTLEVVDAVVDAIGPEKVGLRLSPYGTFNSMSGGAETGIVAQYAYVLGELERRAKAGKRLAFVHLVEPRVTDPSLVEGEGEYSEGTNDFAYSIWKGPIIRAGNYALHPEVVREQVKDPRTLIGYGRFFISNPDLVYRLEEGLPLNKYDRSTFYTMSAEGYIDYPTYEEAVDLGWNKN

SEQ ID NO: 149 - DNA, 1200 bp, synthetic construct
  misc_feature 1..1200: note = Variant of ERED chimera of Old Yellow Enzyme
  source 1..1200: mol_type = other DNA
atgtctttcgttaaggacttcaagccgcaagcactgcgcgacaccaacctgttcgaacctattaaaattgggaacacacagctggctcatcgcgttgtaatgcctccgctgacccgcatgcgcgctacccatccgggcaacattccgaacaaggagtgggctgcggtttactacggccagcgtgcacagcgtccggggacaatgattatcacggaggcgacgttcatcagcccgcaggcaggtgggtacgataacaagcctggtgtttggtcagacgaacaggttgccgaatggaagaacatcttcctggctattcatgactgtcagtcatttgcgtgggtgcaactgcaggtcctgggctgggccgcctttccggataccctggcgcgtgatgggttacgttacgattctgcctccgataatgtgtatatgaatgcggaaagggaggaaaaagcgaaaaaagctaacaatccgcaacatagcattactaaagacgaaattaaacaatatgtcaaagaatatgttcaggcagctaagaactcgatcgctgcgggtgcggacggcgtggaaattcactcagccaacggttatctgttaaatcagttcctggatccgcacagcaacaaccgcaccgatgagtatgggggctcaattgaaaatcgtgcacgttttactctggaagtcgttgacgcggtggttgatgccatcggcccagaaaaagtgggtttacgtctgagtccgtacggcacgttcaactctatgtcgggcggcgcggaaacgggcattgttgctcagtatgcctatgtcctgggtgagctggagcgtcgcgccaaggcggggaaacgcctggcgtttgttcatttagtcgaaccacgcgtgacagacccttctctggttgagggggagggcgaatactcagagggcactaacgattttgcttattccatttggaaaggtccgattatccgtgccggcaactatgcactacatcctgaagtagtgcgcgaacaagttaaggaccctcgcaccctgatcggctacggccgcttctttatttcaaatccagacctggtttaccgcttagaagaaggtctgccactgaacaagtatgaccgttctacgttctacaccatgagcgcggagggttacatcgactacccgacctacgaagaagccgtagatctgggctggaacaaaaac

SEQ ID NO: 150 - protein, 400 aa, synthetic construct
  REGION 1..400: note = Variant of ERED chimera of Old Yellow Enzyme
MSFVKDFKPQALRDTNLFEPIKIGNTQLAHRVVMPPLTRMRATHPGNIPNKEWAAVYYGQRAQRPGTMIITEATFISPQAGGYDNKPGVWSDEQVAEWKNIFLAIHDCQSFAWVQLQVLGWAAFPDTLARDGLRYDSASDNVYMNAEREEKAKKANNPQHSITKDEIKQYVKEYVQAAKNSIAAGADGVEIHSANGYLLNQFLDPHSNNRTDEYGGSIENRARFTLEVVDAVVDAIGPEKVGLRLSPYGTFNSMSGGAETGIVAQYAYVLGELERRAKAGKRLAFVHLVEPRVTDPSLVEGEGEYSEGTNDFAYSIWKGPIIRAGNYALHPEVVREQVKDPRTLIGYGRFFISNPDLVYRLEEGLPLNKYDRSTFYTMSAEGYIDYPTYEEAVDLGWNKN

SEQ ID NO: 151 - DNA, 1200 bp, synthetic construct
  misc_feature 1..1200: note = Variant of ERED chimera of Old Yellow Enzyme
  source 1..1200: mol_type = other DNA
atgtctttcgttaaggacttcaagccgcaagcactgcgcgacaccaacctgttcgaacctattaaaattgggaacacacagctggctcatcgcgttgtaatgcctccgctgacccgcatgcgcgctacccatccgggcaacattccgaacaaggagtgggctgcggtttactacggccagcgtgcacagcgtccggggacaatgattatcacggaggcgacgttcatcagcccgcaggcaggtgggtacgataacaagcctggtgtttggtcagacgaacaggttgccgaatggaagaacatcttcctggctattcatgactgtcagtcatttgcgtggatgcaactgcaggtcctgggctgggccgcctttccggataccctggcgcgtgatgggttacgttacgattctgcctccgataatgtgtatatgaatgcggaacaggaggaaaaagcgaaaaaagctaacaatccgcaacatagcattactaaagacgaaattaaacaatatgtcaaagaatatgttcaggcagctaagaactcgatcgctgcgggtgcggacggcgtggaaattcactcagccaacggttatctgttaaatcagttcctggatccgcacagcaacaaccgcaccgatgagtatgggggctcaattgaaaatcgtgcacgttttactctggaagtcgttgacgcggtggttgatgccatcggcccagaaaaagtgggtttacgtctgagtccgtacggcacgttcaactctatgtcgggcggcgcggaaacgggcattgttgctcagtatgcctatgtcctgggtgagctggagcgtcgcgccaaggcggggaaacgcctggcgtttgttcatttagtcgaaccacgcgtgacagacccttctctggttgagggggagggcgaatactcagagggcactaacgattttgcttattccatttggaaaggtccgattatccgtgccggcaactatgcactacatcctgaagtagtgcgcgaacaagttaaggaccctcgcaccctgatcggctacggccgcttctttatttcaaatccagacctggtttaccgcttagaagaaggtctgccactgaacaagtatgaccgttctacgttctacaccatgagcgcggagggttacatcgactacccgacctacgaagaagccgtagatctgggctggaacaaaaac

SEQ ID NO: 152 - protein, 400 aa, synthetic construct
  REGION 1..400: note = Variant of ERED chimera of Old Yellow Enzyme
MSFVKDFKPQALRDTNLFEPIKIGNTQLAHRVVMPPLTRMRATHPGNIPNKEWAAVYYGQRAQRPGTMIITEATFISPQAGGYDNKPGVWSDEQVAEWKNIFLAIHDCQSFAWMQLQVLGWAAFPDTLARDGLRYDSASDNVYMNAEQEEKAKKANNPQHSITKDEIKQYVKEYVQAAKNSIAAGADGVEIHSANGYLLNQFLDPHSNNRTDEYGGSIENRARFTLEVVDAVVDAIGPEKVGLRLSPYGTFNSMSGGAETGIVAQYAYVLGELERRAKAGKRLAFVHLVEPRVTDPSLVEGEGEYSEGTNDFAYSIWKGPIIRAGNYALHPEVVREQVKDPRTLIGYGRFFISNPDLVYRLEEGLPLNKYDRSTFYTMSAEGYIDYPTYEEAVDLGWNKN

SEQ ID NO: 153 - DNA, 1200 bp, synthetic construct
  misc_feature 1..1200: note = Variant of ERED chimera of Old Yellow Enzyme
  source 1..1200: mol_type = other DNA
atgtctttcgttaaggacttcaagccgcaagcactgcgcgacaccaacctgttcgaacctattaaaattgggaacacacagctggctcatcgcgttgtaatgcctccgctgacccgcatgcgcgctacccatccgggcaacattccgaacaaggagtgggctgcggtttactacggccagcgtgcacagcgtccggggacaatgattatcacggaggcgacgttcatcagcccgcaggcaggtggggttgataacaagcctggtgtttggtcagacgaacaggttgccgaatggaagaacatcttcctggctattcatgactgtcagtcatttgcgtgggtgcaactgcaggtcctgggctgggccgcctttccggataccctggcgcgtgatgggttacgttacgattctgcctccgataatgtgtatatgaatgcggaacaggaggaaaaagcgaaaaaagctaacaatccgcaacatagcattactaaagacgaaattaaacaatatgtcaaagaatatgttcaggcagctaagaactcgatcgctgcgggtgcggacggcgtggaaattcactcagccaacggttatctgttaaatcagttcctggatccgcacagcaacaaccgcaccgatgagtatgggggctcaattgaaaatcgtgcacgttttactctggaagtcgttgacgcggtggttgatgccatcggcccagaaaaagtgggtttacgtctgagtccgtacggcacgttcaactctatgtcgggcggcgcggaaacgggcattgttgctcagtatgcctatgtcctgggtgagctggagcgtcgcgccaaggcggggaaacgcctggcgtttgttcatttagtcgaaccacgcgtgacagacccttctctggttgagggggagggcgaatactcagagggcactaacgattttgcttattccatttggaaaggtccgattatccgtgccggcaactatgcactacatcctgaagtagtgcgcgaacaagttaaggaccctcgcaccctgatcggctacggccgcttctttatttcaaatccagacctggtttaccgcttagaagaaggtctgccactgaacaagtatgaccgttctacgttctacaccatgagcgcggagggttacatcgactacccgacctacgaagaagccgtagatctgggctggaacaaaaac

SEQ ID NO: 154 - protein, 400 aa, synthetic construct
  REGION 1..400: note = Variant of ERED chimera of Old Yellow Enzyme
MSFVKDFKPQALRDTNLFEPIKIGNTQLAHRVVMPPLTRMRATHPGNIPNKEWAAVYYGQRAQRPGTMIITEATFISPQAGGVDNKPGVWSDEQVAEWKNIFLAIHDCQSFAWVQLQVLGWAAFPDTLARDGLRYDSASDNVYMNAEQEEKAKKANNPQHSITKDEIKQYVKEYVQAAKNSIAAGADGVEIHSANGYLLNQFLDPHSNNRTDEYGGSIENRARFTLEVVDAVVDAIGPEKVGLRLSPYGTFNSMSGGAETGIVAQYAYVLGELERRAKAGKRLAFVHLVEPRVTDPSLVEGEGEYSEGTNDFAYSIWKGPIIRAGNYALHPEVVREQVKDPRTLIGYGRFFISNPDLVYRLEEGLPLNKYDRSTFYTMSAEGYIDYPTYEEAVDLGWNKN

SEQ ID NO: 155 - DNA, 1200 bp, synthetic construct
  misc_feature 1..1200: note = Variant of ERED chimera of Old Yellow Enzyme
  source 1..1200: mol_type = other DNA
atgtctttcgttaaggacttcaagccgcaagcactgcgcgacaccaacctgttcgaacctattaaaattgggaacacacagctggctcatcgcgttgtaatgcctccgctgacccgcatgcgcgctacccatccgggcaacattccgaacaaggagtgggctgcggtttactacggccagcgtgcacagcgtccggggacaatgattatcacggaggcgacgttcatcagcccgcaggcaggtgggatggataacaagcctggtgtttggtcagacgaacaggttgccgaatggaagaacatcttcctggctattcatgactgtcagtcatttgcgtgggtgcaactgcaggtcctgggctgggccgcctttccggataccctggcgcgtgatgggttacgttacgattctgcctccgataatgtgtatatgaatgcggaacaggaggaaaaagcgaaaaaagctaacaatccgcaacatagcattactaaagacgaaattaaacaatatgtcaaagaatatgttcaggcagctaagaactcgatcgctgcgggtgcggacggcgtggaaattcactcagccaacggttatctgttaaatcagttcctggatccgcacagcaacaaccgcaccgatgagtatgggggctcaattgaaaatcgtgcacgttttactctggaagtcgttgacgcggtggttgatgccatcggcccagaaaaagtgggtttacgtctgagtccgtacggcacgttcaactctatgtcgggcggcgcggaaacgggcattgttgctcagtatgcctatgtcctgggtgagctggagcgtcgcgccaaggcggggaaacgcctggcgtttgttcatttagtcgaaccacgcgtgacagacccttctctggttgagggggagggcgaatactcagagggcactaacgattttgcttattccatttggaaaggtccgattatccgtgccggcaactatgcactacatcctgaagtagtgcgcgaacaagttaaggaccctcgcaccctgatcggctacggccgcttctttatttcaaatccagacctggtttaccgcttagaagaaggtctgccactgaacaagtatgaccgttctacgttctacaccatgagcgcggagggttacatcgactacccgacctacgaagaagccgtagatctgggctggaacaaaaac

SEQ ID NO: 156 - protein, 400 aa, synthetic construct
  REGION 1..400: note = Variant of ERED chimera of Old Yellow Enzyme
MSFVKDFKPQALRDTNLFEPIKIGNTQLAHRVVMPPLTRMRATHPGNIPNKEWAAVYYGQRAQRPGTMIITEATFISPQAGGMDNKPGVWSDEQVAEWKNIFLAIHDCQSFAWVQLQVLGWAAFPDTLARDGLRYDSASDNVYMNAEQEEKAKKANNPQHSITKDEIKQYVKEYVQAAKNSIAAGADGVEIHSANGYLLNQFLDPHSNNRTDEYGGSIENRARFTLEVVDAVVDAIGPEKVGLRLSPYGTFNSMSGGAETGIVAQYAYVLGELERRAKAGKRLAFVHLVEPRVTDPSLVEGEGEYSEGTNDFAYSIWKGPIIRAGNYALHPEVVREQVKDPRTLIGYGRFFISNPDLVYRLEEGLPLNKYDRSTFYTMSAEGYIDYPTYEEAVDLGWNKN

SEQ ID NO: 157 - DNA, 1200 bp, synthetic construct
  misc_feature 1..1200: note = Variant of ERED chimera of Old Yellow Enzyme
  source 1..1200: mol_type = other DNA
atgtctttcgttaaggacttcaagccgcaagcactgcgcgacaccaacctgttcgaacctattaaaattgggaacacacagctggctcatcgcgttgtaatgcctccgctgacccgcgggcgcgctacccatccgggcaacattccgaacaaggagtgggctgcggtttactacggccagcgtgcacagcgtccggggacaatgattatcacggaggcgacgttcatcagcccgcaggcaggtgggtacgataacaagcctggtgtttggtcagacgaacaggttgccgaatggaagaacatcttcctggctattcatgactgtcagtcatttgcgtgggtgcaactgcaggtcctgggctgggccgcctttccggataccctggcgcgtgatgggttacgttacgattctgcctccgataatgtgtatatgaatgcggaacaggaggaaaaagcgaaaaaagctaacaatccgcaacatagcattactaaagacgaaattaaacaatatgtcaaagaatatgttcaggcagctaagaactcgatcgctgcgggtgcggacggcgtggaaattcactcagccaacggttatctgttaaatcagttcctggatccgcacagcaacaaccgcaccgatgagtatgggggctcaattgaaaatcgtgcacgttttactctggaagtcgttgacgcggtggttgatgccatcggcccagaaaaagtgggtttacgtctgagtccgtacggcacgttcaactctatgtcgggcggcgcggaaacgggcattgttgctcagtatgcctatgtcctgggtgagctggagcgtcgcgccaaggcggggaaacgcctggcgtttgttcatttagtcgaaccacgcgtgacagacccttctctggttgagggggagggcgaatactcagagggcactaacgattttgcttattccatttggaaaggtccgattatccgtgccggcaactatgcactacatcctgaagtagtgcgcgaacaagttaaggaccctcgcaccctgatcggctacggccgcttctttatttcaaatccagacctggtttaccgcttagaagaaggtctgccactgaacaagtatgaccgttctacgttctacaccatgagcgcggagggttacatcgactacccgacctacgaagaagccgtagatctgggctggaacaaaaac

SEQ ID NO: 158 - protein, 400 aa, synthetic construct
  REGION 1..400: note = Variant of ERED chimera of Old Yellow Enzyme
MSFVKDFKPQALRDTNLFEPIKIGNTQLAHRVVMPPLTRGRATHPGNIPNKEWAAVYYGQRAQRPGTMIITEATFISPQAGGYDNKPGVWSDEQVAEWKNIFLAIHDCQSFAWVQLQVLGWAAFPDTLARDGLRYDSASDNVYMNAEQEEKAKKANNPQHSITKDEIKQYVKEYVQAAKNSIAAGADGVEIHSANGYLLNQFLDPHSNNRTDEYGGSIENRARFTLEVVDAVVDAIGPEKVGLRLSPYGTFNSMSGGAETGIVAQYAYVLGELERRAKAGKRLAFVHLVEPRVTDPSLVEGEGEYSEGTNDFAYSIWKGPIIRAGNYALHPEVVREQVKDPRTLIGYGRFFISNPDLVYRLEEGLPLNKYDRSTFYTMSAEGYIDYPTYEEAVDLGWNKN

SEQ ID NO: 159 - DNA, 1200 bp, synthetic construct
  misc_feature 1..1200: note = Variant of ERED chimera of Old Yellow Enzyme
  source 1..1200: mol_type = other DNA
atgtctttcgttaaggacttcaagccgcaagcactgcgcgacaccaacctgttcgaacctattaaaattgggaacacacagctggctcatcgcgttgtaatgcctccgctgacccgcatgcgcgctacccatccgggcaacattccgaacaaggagtgggctgcggtttactacggccagcgtgcacagcgtccggggacaatgattatcacggaggcgacgttcatcagcccgcaggcaggtgggtacgataacaagcctggtgtttggtcagacgaacaggttgccgaatggaagaacatcttcctggctattcatgactgtcagtcatttgcgtgggtgcaactgcaggtcctgggctgggccgcctttccggataccctggcgcgtgatgggttacgttacgattctgcctccgataatgtgtatatgaatgcggaacaggaggaaaaagcgaaaaaagctaacaatccgcaacatagcattactaaagacgaaattaaacaatatgtcaaagaatatgttcaggcagctaagaactcgatcgctgcgggtgcggacggcgtggaaattcactcagccaacggttatctgttaaatcagttcctggatccgcacagcaacaaccgcaccgatgagtatgggggctcaattgaaaatcgtgcacgttttactctggaagtcgttgacgcggtggttgatgccatcggcccagaaaaagtgggtttacgtctgagtccgtacggcacgttcaactctatgtcgggcggcgcggaaacgagtattgttgctcagtatgcctatgtcctgggtgagctggagcgtcgcgccaaggcggggaaacgcctggcgtttgttcatttagtcgaaccacgcgtgacagacccttctctggttgagggggagggcgaatactcagagggcactaacgattttgcttattccatttggaaaggtccgattatccgtgccggcaactatgcactacatcctgaagtagtgcgcgaacaagttaaggaccctcgcaccctgatcggctacggccgcttctttatttcaaatccagacctggtttaccgcttagaagaaggtctgccactgaacaagtatgaccgttctacgttctacaccatgagcgcggagggttacatcgactacccgacctacgaagaagccgtagatctgggctggaacaaaaac

SEQ ID NO: 160 - protein, 400 aa, synthetic construct
  REGION 1..400: note = Variant of ERED chimera of Old Yellow Enzyme
MSFVKDFKPQALRDTNLFEPIKIGNTQLAHRVVMPPLTRMRATHPGNIPNKEWAAVYYGQRAQRPGTMIITEATFISPQAGGYDNKPGVWSDEQVAEWKNIFLAIHDCQSFAWVQLQVLGWAAFPDTLARDGLRYDSASDNVYMNAEQEEKAKKANNPQHSITKDEIKQYVKEYVQAAKNSIAAGADGVEIHSANGYLLNQFLDPHSNNRTDEYGGSIENRARFTLEVVDAVVDAIGPEKVGLRLSPYGTFNSMSGGAETSIVAQYAYVLGELERRAKAGKRLAFVHLVEPRVTDPSLVEGEGEYSEGTNDFAYSIWKGPIIRAGNYALHPEVVREQVKDPRTLIGYGRFFISNPDLVYRLEEGLPLNKYDRSTFYTMSAEGYIDYPTYEEAVDLGWNKN

SEQ ID NO: 161 - DNA, 1200 bp, synthetic construct
  misc_feature 1..1200: note = Variant of ERED chimera of Old Yellow Enzyme
  source 1..1200: mol_type = other DNA
atgtctttcgttaaggacttcaagccgcaagcactgcgcgacaccaacctgttcgaacctattaaaattgggaacacacagctggctcatcgcgttgtaatgcctccgctgacccgcatgcgcgctacccatccgggcaacattccgaacaaggagtgggctgcggtttactacggccagcgtgcacagcgtccggggacaatgattatcacggaggcgacgttcatcagcccgcaggcaggtgggtacgataacaagcctggtgtttggtcagacgaacaggttgccgaatggaagaacatcttcctggctattcatgactgtcagtcatttgcgtgggtgcaactgcaggtcctgggctgggccgcctttccggataccctggcgcgtgatgggttacgttacgattctgcctccgataatgtgtatatgaatgcggaacaggaggaaaaagcgaaaaaagctaacaatccgcaacatagcattactaaagacgaaattaaacaatatgtcaaagaatatgttcaggcagctaagaactcgatcgctgcgggtgcggacggcgtggaaattcactcagccaacggttatctgttaaatcagttcctggatccgcacagcaacaaccgcaccgatgagtatgggggctcaattgaaaatcgtgcacgttttactctggaagtcgttgacgcggtggttgatgccatcggcccagaaaaagtgggtttacgtctgagtccgtacggcacgttcaactctatgtcgggcggcgcggaaacgtgtattgttgctcagtatgcctatgtcctgggtgagctggagcgtcgcgccaaggcggggaaacgcctggcgtttgttcatttagtcgaaccacgcgtgacagacccttctctggttgagggggagggcgaatactcagagggcactaacgattttgcttattccatttggaaaggtccgattatccgtgccggcaactatgcactacatcctgaagtagtgcgcgaacaagttaaggaccctcgcaccctgatcggctacggccgcttctttatttcaaatccagacctggtttaccgcttagaagaaggtctgccactgaacaagtatgaccgttctacgttctacaccatgagcgcggagggttacatcgactacccgacctacgaagaagccgtagatctgggctggaacaaaaac

SEQ ID NO: 162 - protein, 400 aa, synthetic construct
  REGION 1..400: note = Variant of ERED chimera of Old Yellow Enzyme
MSFVKDFKPQALRDTNLFEPIKIGNTQLAHRVVMPPLTRMRATHPGNIPNKEWAAVYYGQRAQRPGTMIITEATFISPQAGGYDNKPGVWSDEQVAEWKNIFLAIHDCQSFAWVQLQVLGWAAFPDTLARDGLRYDSASDNVYMNAEQEEKAKKANNPQHSITKDEIKQYVKEYVQAAKNSIAAGADGVEIHSANGYLLNQFLDPHSNNRTDEYGGSIENRARFTLEVVDAVVDAIGPEKVGLRLSPYGTFNSMSGGAETCIVAQYAYVLGELERRAKAGKRLAFVHLVEPRVTDPSLVEGEGEYSEGTNDFAYSIWKGPIIRAGNYALHPEVVREQVKDPRTLIGYGRFFISNPDLVYRLEEGLPLNKYDRSTFYTMSAEGYIDYPTYEEAVDLGWNKN

SEQ ID NO: 163 - DNA, 1200 bp, synthetic construct
  misc_feature 1..1200: note = Variant of ERED chimera of Old Yellow Enzyme
  source 1..1200: mol_type = other DNA
atgtctttcgttaaggacttcaagccgcaagcactgcgcgacaccaacctgttcgaacctattaaaattgggaacacacagctggctcatcgcgttgtaatgcctccgctgacccgcatgcgcgctacccatccgggcaacattccgaacaaggagtgggctgcggtttactacggccagcgtgcacagcgtccggggacaatgattatcacggaggcgacgttcatcagcccgcaggcaggtgggtttgataacaagcctggtgtttggtcagacgaacaggttgccgaatggaagaacatcttcctggctattcatgactgtcagtcatttgcgtgggtgcaactgcaggtcctgggctgggccgcctttccggataccctggcgcgtgatgggttacgttacgattctgcctccgataatgtgtatatgaatgcggaacaggaggaaaaagcgaaaaaagctaacaatccgcaacatagcattactaaagacgaaattaaacaatatgtcaaagaatatgttcaggcagctaagaactcgatcgctgcgggtgcggacggcgtggaaattcactcagccaacggttatctgttaaatcagttcctggatccgcacagcaacaaccgcaccgatgagtatgggggctcaattgaaaatcgtgcacgttttactctggaagtcgttgacgcggtggttgatgccatcggcccagaaaaagtgggtttacgtctgagtccgtacggcacgttcaactctatgtcgggcggcgcggaaacgggcattgttgctcagtatgcctatgtcctgggtgagctggagcgtcgcgccaaggcggggaaacgcctggcgtttgttcatttagtcgaaccacgcgtgacagacccttctctggttgagggggagggcgaatactcagagggcactaacgattttgcttattccatttggaaaggtccgattatccgtgccggcaactatgcactacatcctgaagtagtgcgcgaacaagttaaggaccctcgcaccctgatcggctacggccgcttctttatttcaaatccagacctggtttaccgcttagaagaaggtctgccactgaacaagtatgaccgttctacgttctacaccatgagcgcggagggttacatcgactacccgacctacgaagaagccgtagatctgggctggaacaaaaac

SEQ ID NO: 164 - protein, 400 aa, synthetic construct
  REGION 1..400: note = Variant of ERED chimera of Old Yellow Enzyme
MSFVKDFKPQALRDTNLFEPIKIGNTQLAHRVVMPPLTRMRATHPGNIPNKEWAAVYYGQRAQRPGTMIITEATFISPQAGGFDNKPGVWSDEQVAEWKNIFLAIHDCQSFAWVQLQVLGWAAFPDTLARDGLRYDSASDNVYMNAEQEEKAKKANNPQHSITKDEIKQYVKEYVQAAKNSIAAGADGVEIHSANGYLLNQFLDPHSNNRTDEYGGSIENRARFTLEVVDAVVDAIGPEKVGLRLSPYGTFNSMSGGAETGIVAQYAYVLGELERRAKAGKRLAFVHLVEPRVTDPSLVEGEGEYSEGTNDFAYSIWKGPIIRAGNYALHPEVVREQVKDPRTLIGYGRFFISNPDLVYRLEEGLPLNKYDRSTFYTMSAEGYIDYPTYEEAVDLGWNKN

SEQ ID NO: 165 - DNA, 1200 bp, synthetic construct
  misc_feature 1..1200: note = Variant of ERED chimera of Old Yellow Enzyme
  source 1..1200: mol_type = other DNA
atgtctttcgttaaggacttcaagccgcaagcactgcgcgacaccaacctgttcgaacctattaaaattgggaacacacagctggctcatcgcgttgtaatgcctccgctgacccgcatgcgcgctacccatccgggcaacattccgaacaaggagtgggctgcggtttactacggccagcgtgcacagcgtccggggacaatgattatcacggaggcgacgttcatcagcccgcaggcaggtgggtacgataacaagcctggtgtttggtcagacgaacaggttgccgaatggaagaacatcttcctggctattcatgactgtcagtcatttgcgtgggtgcaactgcaggcgctgggctgggccgcctttccggataccctggcgcgtgatgggttacgttacgattctgcctccgataatgtgtatatgaatgcggaacaggaggaaaaagcgaaaaaagctaacaatccgcaacatagcattactaaagacgaaattaaacaatatgtcaaagaatatgttcaggcagctaagaactcgatcgctgcgggtgcggacggcgtggaaattcactcagccaacggttatctgttaaatcagttcctggatccgcacagcaacaaccgcaccgatgagtatgggggctcaattgaaaatcgtgcacgttttactctggaagtcgttgacgcggtggttgatgccatcggcccagaaaaagtgggtttacgtctgagtccgtacggcacgttcaactctatgtcgggcggcgcggaaacgggcattgttgctcagtatgcctatgtcctgggtgagctggagcgtcgcgccaaggcggggaaacgcctggcgtttgttcatttagtcgaaccacgcgtgacagacccttctctggttgagggggagggcgaatactcagagggcactaacgattttgcttattccatttggaaaggtccgattatccgtgccggcaactatgcactacatcctgaagtagtgcgcgaacaagttaaggaccctcgcaccctgatcggctacggccgcttctttatttcaaatccagacctggtttaccgcttagaagaaggtctgccactgaacaagtatgaccgttctacgttctacaccatgagcgcggagggttacatcgactacccgacctacgaagaagccgtagatctgggctggaacaaaaac

SEQ ID NO: 166 - protein, 400 aa, synthetic construct
  REGION 1..400: note = Variant of ERED chimera of Old Yellow Enzyme
MSFVKDFKPQALRDTNLFEPIKIGNTQLAHRVVMPPLTRMRATHPGNIPNKEWAAVYYGQRAQRPGTMIITEATFISPQAGGYDNKPGVWSDEQVAEWKNIFLAIHDCQSFAWVQLQALGWAAFPDTLARDGLRYDSASDNVYMNAEQEEKAKKANNPQHSITKDEIKQYVKEYVQAAKNSIAAGADGVEIHSANGYLLNQFLDPHSNNRTDEYGGSIENRARFTLEVVDAVVDAIGPEKVGLRLSPYGTFNSMSGGAETGIVAQYAYVLGELERRAKAGKRLAFVHLVEPRVTDPSLVEGEGEYSEGTNDFAYSIWKGPIIRAGNYALHPEVVREQVKDPRTLIGYGRFFISNPDLVYRLEEGLPLNKYDRSTFYTMSAEGYIDYPTYEEAVDLGWNKN

SEQ ID NO: 167 - DNA, 1200 bp, synthetic construct
  misc_feature 1..1200: note = Variant of ERED chimera of Old Yellow Enzyme
  source 1..1200: mol_type = other DNA
atgtctttcgttaaggacttcaagccgcaagcactgcgcgacaccaacctgttcgaacctattaaaattgggaacacacagctggctcatcgcgttgtaatgcctccgctgacccgcatgcgcgctacccatccgggcaacattccgaacaaggagtgggctgcggtttactacggccagcgtgcacagcgtccggggacaatgattatcacggaggcgacgttcatcagcccgcaggcaggtgggtacgataacaagcctggtgtttggtcagacgaacaggttgccgaatggaagaacatcttcctggctattcatgactgtcagtcatttgcgtgggtgcaactgcaggtcctgggctgggccgcctttccggataccctggcgcgtgatgggttacgttacgattctgcctccgataatgtgtatatgaatgcggaagcggaggaaaaagcgaaaaaagctaacaatccgcaacatagcattactaaagacgaaattaaacaatatgtcaaagaatatgttcaggcagctaagaactcgatcgctgcgggtgcggacggcgtggaaattcactcagccaacggttatctgttaaatcagttcctggatccgcacagcaacaaccgcaccgatgagtatgggggctcaattgaaaatcgtgcacgttttactctggaagtcgttgacgcggtggttgatgccatcggcccagaaaaagtgggtttacgtctgagtccgtacggcacgttcaactctatgtcgggcggcgcggaaacgggcattgttgctcagtatgcctatgtcctgggtgagctggagcgtcgcgccaaggcggggaaacgcctggcgtttgttcatttagtcgaaccacgcgtgacagacccttctctggttgagggggagggcgaatactcagagggcactaacgattttgcttattccatttggaaaggtccgattatccgtgccggcaactatgcactacatcctgaagtagtgcgcgaacaagttaaggaccctcgcaccctgatcggctacggccgcttctttatttcaaatccagacctggtttaccgcttagaagaaggtctgccactgaacaagtatgaccgttctacgttctacaccatgagcgcggagggttacatcgactacccgacctacgaagaagccgtagatctgggctggaacaaaaac

SEQ ID NO: 168 - protein, 400 aa, synthetic construct
  REGION 1..400: note = Variant of ERED chimera of Old Yellow Enzyme
MSFVKDFKPQALRDTNLFEPIKIGNTQLAHRVVMPPLTRMRATHPGNIPNKEWAAVYYGQRAQRPGTMIITEATFISPQAGGYDNKPGVWSDEQVAEWKNIFLAIHDCQSFAWVQLQVLGWAAFPDTLARDGLRYDSASDNVYMNAEAEEKAKKANNPQHSITKDEIKQYVKEYVQAAKNSIAAGADGVEIHSANGYLLNQFLDPHSNNRTDEYGGSIENRARFTLEVVDAVVDAIGPEKVGLRLSPYGTFNSMSGGAETGIVAQYAYVLGELERRAKAGKRLAFVHLVEPRVTDPSLVEGEGEYSEGTNDFAYSIWKGPIIRAGNYALHPEVVREQVKDPRTLIGYGRFFISNPDLVYRLEEGLPLNKYDRSTFYTMSAEGYIDYPTYEEAVDLGWNKN

SEQ ID NO: 169 - DNA, 1200 bp, synthetic construct
  misc_feature 1..1200: note = Variant of ERED chimera of Old Yellow Enzyme
  source 1..1200: mol_type = other DNA
atgtctttcgttaaggacttcaagccgcaagcactgcgcgacaccaacctgttcgaacctattaaaattgggaacacacagctggctcatcgcgtcgtaatgcctccgctgacccgcatgcgcgctacccatccgggcaacattccgaacaaggagtgggctgcggtttactacggccagcgtgcacagcgtccggggacaatgattatcacggaggcgacgttcatcagcccgcaggcaggtgggtacgataacaagcctggtgtttggtcagacgaacaggttgccgaatggaagaacatcttccgtgctattcatcaatgtcagtcatttgcgtgggtgcaactgcaggtcctgggctgggccgccagcccggataccctggcgcgtgatgggttacgttacgattctgcctccgataatgtgtatatgaatgcggaacaggaggaaaaagcgaaaaaagctaacaatccgcaacatagcattactaaagacgaaattaaacaatatgtcaaagaatatgttcaggcagctaagaactcgatcgctgcgggtgcggacggcgtggaaattcactcagccaacggttatctgttaaatcagttcctggatccgcacagcaacaaccgcaccgatgagtatgggggctcaattgaaaatcgtgcacgttttactctggaagtcgttgacgcggtggttgatgccatcggcccagaaaaagtgggtttacgtctgagtccgtacggcacgttcaactctatgtcgggcggcgcggaaacgggcattgttgctcagtatgcctatgtcctgggtgagctggagcgtcgcgccaaggcggggaaacgcctggcgtttgttcatttagtcgaaccacgcgtgacagacccttctctggttgagggggagggcgaatactcagagggcactaacgattttgcttattccatttggaaaggtccgattatccgtgccggcaactatgcactacatcctgaagtagtgcgcgaacaagttaaggacccgcgcaccctgatcggctacggccgcttctttatttcaaatccagacctggtttaccgcttagaagaaggtctgccactgaacaagtatgaccgttctacgttctacaccatgagcgcggagggttacatcgactacccgacctacgaagaagccgtagatctgggctggaacaaaaac

SEQ ID NO: 170 - protein, 400 aa, synthetic construct
  REGION 1..400: note = Variant of ERED chimera of Old Yellow Enzyme
MSFVKDFKPQALRDTNLFEPIKIGNTQLAHRVVMPPLTRMRATHPGNIPNKEWAAVYYGQRAQRPGTMIITEATFISPQAGGYDNKPGVWSDEQVAEWKNIFRAIHQCQSFAWVQLQVLGWAASPDTLARDGLRYDSASDNVYMNAEQEEKAKKANNPQHSITKDEIKQYVKEYVQAAKNSIAAGADGVEIHSANGYLLNQFLDPHSNNRTDEYGGSIENRARFTLEVVDAVVDAIGPEKVGLRLSPYGTFNSMSGGAETGIVAQYAYVLGELERRAKAGKRLAFVHLVEPRVTDPSLVEGEGEYSEGTNDFAYSIWKGPIIRAGNYALHPEVVREQVKDPRTLIGYGRFFISNPDLVYRLEEGLPLNKYDRSTFYTMSAEGYIDYPTYEEAVDLGWNKN

SEQ ID NO: 171 - DNA, 1200 bp, synthetic construct
  misc_feature 1..1200: note = Variant of ERED chimera of Old Yellow Enzyme
  source 1..1200: mol_type = other DNA
atgtctttcgttaaggacttcaagccgcaagcactgcgcgacaccaacctgttcgaacctattaaaattgggaacacacagctggctcatcgcgtcgtaatgcctccgctgacccgcatgcgcgctacccacccgggcaacattccgaacaaggagtgggctgcggtttactacggccagcgtgcacagcgtccggggacaatgattatcacggaggcgacgttcatcagcccgcaggcaggtgggtacgataacaagcctggtgtttggtcagacgaacaggttgccgaatggaagaacatcttcctggctattcatgactgtcagtcatttgcgtgggtgcaactgcaggtcctgggctgggccgccagcccggataccctggcgcgtgatgggttacgttacgattctgcctccgataatgtgtatatgaatgcggaacaggagatgaaagcgaaaaaagctaacaatccgcaacatagcattactaaagacgaaattaaacaatatgtcaaagaatatgttcaggcagctaagaactcgatcgctgcgggtgcggacggcgtggaaattcactcagccaacggttatctgttaaatcagttcctggatccgcacagcaacaaccgcaccgatgagtatgggggctcaattgaaaatcgtgcacgttttactctggaagtcgttgacgcggtggttgatgccatcggcccagaaaaagtgggtttacgtctgagtccgtacggcacgttcaactctatgtcgggcggcgcggaaactggcattgttgctcagtatgcctatgtcctgggtgagctggagcgtcgcgccaaggcggggaaacgcctggcgtttgttcatttagtcgaaccacgcgtgacagacccttctctggttgagggggagggcgaatactcagagggcactaacgattttgcttattccatttggaaaggtccgattatccgtgccggcaactatgcactacatcctgaagtagtgcgcgaacaagttaaggacccgcgcaccctgatcggctacggccgcttctttatttcaaatccagacctggtttaccgcttagaagaaggtctgccactgaacaagtatgaccgttctacgttctacaccatgagcgcggagggttacatcgactacccgacctacgaagaagccgtagatctgggctggaacaaaaac

SEQ ID NO: 172 - protein, 400 aa, synthetic construct
  REGION 1..400: note = Variant of ERED chimera of Old Yellow Enzyme
MSFVKDFKPQALRDTNLFEPIKIGNTQLAHRVVMPPLTRMRATHPGNIPNKEWAAVYYGQRAQRPGTMIITEATFISPQAGGYDNKPGVWSDEQVAEWKNIFLAIHDCQSFAWVQLQVLGWAASPDTLARDGLRYDSASDNVYMNAEQEMKAKKANNPQHSITKDEIKQYVKEYVQAAKNSIAAGADGVEIHSANGYLLNQFLDPHSNNRTDEYGGSIENRARFTLEVVDAVVDAIGPEKVGLRLSPYGTFNSMSGGAETGIVAQYAYVLGELERRAKAGKRLAFVHLVEPRVTDPSLVEGEGEYSEGTNDFAYSIWKGPIIRAGNYALHPEVVREQVKDPRTLIGYGRFFISNPDLVYRLEEGLPLNKYDRSTFYTMSAEGYIDYPTYEEAVDLGWNKN

SEQ ID NO: 173 - DNA, 1200 bp, synthetic construct
  misc_feature 1..1200: note = Variant of ERED chimera of Old Yellow Enzyme
  source 1..1200: mol_type = other DNA
atgtctttcgttaaggacttcaagccgcaagcactgcgcgacaccaacctgttcgaacctattaaaattgggaacacacagctggctcatcgcgccgtaatgcctccgctgacccgcatgcgcgctacctacccgggcaacattccgaacaaggagtgggctgcggtttactacggccagcgtgcacagcgtccggggacaatgattatcacggaggcgacgttcatcagcccgcaggcaggtgggtacgataacaagcctggtgtttggtcagacgaacaggttgccgaatggaagaacatcttcctggctattcatcaatgtcagtcatttgcgtgggtgcaactgcaggtcctgggctgggccgccagcccggataacctggcgcgtgatgggttacgttacgattctgcctccgataatgtgtatatgaatgcggaacaggagatgaaagcgaaaaaagctaacaatccgcaacatagcattactaaagacgaaattaaacaatatgtcaaagaatatgttcaggcagctaagaactcgatcgaggcgggtgcggacggcgtggaaattcactcagccaacggttatctgttaaatcagttcctggatccgcacagcaacaaccgcaccgatgagtatgggggctcaattgaaaatcgtgcacgttttactctggaagtcgttgacgcggtggttgatgccatcggcccagaaaaagtgggtttacgtctgagtccgtacggcactttcaactctatgtcgggcggcgcggaaactggcattgttgctcagtatgcctatgtcctgggtgagctggagcgtcgcgccaaggcggggaaacgcctggcgtttgttcatttagtcgaaccacgcgtgacagacccttctctggttgagggggagggcgaatactcagagggcactaacgattttgcttattccatttggaaaggtccgattatccgtgccggcaactatgcactacatcctgaagtagtgcgcgaacaagttaaggacccgcgcaccctgatcggctacggccgcttctttatttcaaatccagacctggtttaccgcttagaagaaggtctgccactgaacaagtatgaccgttctacgttctacaccatgagcgcggagggttacatcgactacccgacctacgaagaagccgtagatctgggctggaacaaaaac

SEQ ID NO: 174 - protein, 400 aa, synthetic construct
  REGION 1..400: note = Variant of ERED chimera of Old Yellow Enzyme
MSFVKDFKPQALRDTNLFEPIKIGNTQLAHRAVMPPLTRMRATYPGNIPNKEWAAVYYGQRAQRPGTMIITEATFISPQAGGYDNKPGVWSDEQVAEWKNIFLAIHQCQSFAWVQLQVLGWAASPDNLARDGLRYDSASDNVYMNAEQEMKAKKANNPQHSITKDEIKQYVKEYVQAAKNSIEAGADGVEIHSANGYLLNQFLDPHSNNRTDEYGGSIENRARFTLEVVDAVVDAIGPEKVGLRLSPYGTFNSMSGGAETGIVAQYAYVLGELERRAKAGKRLAFVHLVEPRVTDPSLVEGEGEYSEGTNDFAYSIWKGPIIRAGNYALHPEVVREQVKDPRTLIGYGRFFISNPDLVYRLEEGLPLNKYDRSTFYTMSAEGYIDYPTYEEAVDLGWNKN

SEQ ID NO: 175 - DNA, 1200 bp, synthetic construct
  misc_feature 1..1200: note = Variant of ERED chimera of Old Yellow Enzyme
  source 1..1200: mol_type = other DNA
atgtctttcgttaaggacttcaagccgcaagcactgcgcgacaccaacctgttcgaacctattaaaattgggaacacacagctggctcatcgcgccgtaatgcctccgctgacccgcatgcgcgctacctacccgggcaacattccgaacaaggagtgggctgcggtttactacggccagcgtgcacagcgtccggggacaatgattatcacggaggcgacgttcatcagcccgcaggcaggtgggtacgataacaagcctggtgtttggtcagacgaacaggttgccgaatggaagaacatcttcacggctattcatcaatgtcagtcatttgcgtgggtgcaactgcaggtcctgggctgggccgccagcccggataacctggcgcgtgatgggttacgttacgattctgcctccgataatgtgtatatgaatgcggaacaggagatgaaagcgaaaaaagctaacaatccgcaacatagcattactaaagacgaaattaaacaatatgtcaaagaatatgttcaggcagctaagaactcgatcgctgcgggtgcggacggcgtggaaattcactcagccaacggttatctgttaaatcagttcctggatccgcacagcaacaaccgcaccgatgagtatgggggctcaattgaaaatcgtgcacgttttactctggaagtcgttgacgcggtggttgatgccatcggcccagaaaaagtgggtttacgtctgagtccgtacggccgtttcaactctatgtcgggcggcgcggaaactggcattgttgctcagtatgcctatgtcctgggtgagctggagcgtcgcgccaaggcggggaaacgcctggcgtttgttcatttagtcgaaccacgcgtgacagacccttctctggttgagggggagggcgaatactcagagggcactaacgattttgcttattccatttggaaaggtccgattatccgtgccggcaactatgcactacatcctgaagtagtgcgcgaacaagttaaggacccgcgcaccctgatcggctacggccgcttctttatttcaaatccagacctggtttaccgcttagaagaaggtctgccactgaacaagtatgaccgttctacgttctacaccatgagcgcggagggttacatcgactacccgacctacgaagaagccgtagatctgggctggaacaaaaac

SEQ ID NO: 176 - protein, 400 aa, synthetic construct
  REGION 1..400: note = Variant of ERED chimera of Old Yellow Enzyme
MSFVKDFKPQALRDTNLFEPIKIGNTQLAHRAVMPPLTRMRATYPGNIPNKEWAAVYYGQRAQRPGTMIITEATFISPQAGGYDNKPGVWSDEQVAEWKNIFTAIHQCQSFAWVQLQVLGWAASPDNLARDGLRYDSASDNVYMNAEQEMKAKKANNPQHSITKDEIKQYVKEYVQAAKNSIAAGADGVEIHSANGYLLNQFLDPHSNNRTDEYGGSIENRARFTLEVVDAVVDAIGPEKVGLRLSPYGRFNSMSGGAETGIVAQYAYVLGELERRAKAGKRLAFVHLVEPRVTDPSLVEGEGEYSEGTNDFAYSIWKGPIIRAGNYALHPEVVREQVKDPRTLIGYGRFFISNPDLVYRLEEGLPLNKYDRSTFYTMSAEGYIDYPTYEEAVDLGWNKN

SEQ ID NO: 177 - DNA, 1200 bp, synthetic construct
  misc_feature 1..1200: note = Variant of ERED chimera of Old Yellow Enzyme
  source 1..1200: mol_type = other DNA
atgtctttcgttaaggacttcaagccgcaagcactgcgcgacaccaacctgttcgaacctattaaaattgggaacacacagctggctcatcgcgtcgtaatgcctccgctgacccgcatgcgcgctacctacccgggcaacattccgaacaaggagtgggctgcggtttactacggccagcgtgcacagcgtccggggacaatgattatcacggaggcgacgttcataagcccgcaggcaggtgggtacgataacaagcctggtgtttggtcagacgaacaggttgccgaatggaagaacatcttccaggctattcatgactgtcagtcatttgcgtgggtgcaactgcaggtcctgggctgggccgccagcccggataacctggcgcgtgatgggttacgttacgattctgcctccgataatgtgtatatgaatgcggaacaggagatgaaagcgaaaaaagctaacaatccgcaacatagcattactaaagacgaaattaaacaatatgtcaaagaatatgttcaggcagctaagaactcgatcgaggcgggtgcggacggcgtggaaattcactcagccaacggttatctgttaaatcagttcctggatccgcacagcaacaaccgcaccgatgagtatgggggctcaattgaaaatcgtgcacgttttactctggaagtcgttgacgcggtggttgatgccatcggcccagaaaaagtgggtttacgtctgagtccgtacggcactttcaactctatgtcgggcggcgcggaacctggcattgttgctcagtatgcctatgtcctgggtgagctggagcgtcgcgccaaggcggggaaacgcctggcgtttgttcatttagtcgaaccacgcgtgacagacccttctctggttgagggggagggcgaatactcagagggcactaacgattttgcttattccatttggaaaggtccgattatccgtgccggcaactatgcactacatcctgaagtagtgcgcgaacaagttaaggacccgcgcaccctgatcggctacggccgcttctttatttcaaatccagacctggtttaccgcttagaagaaggtctgccactgaacaagtatgaccgttctacgttctacaccatgagcgcggagggttacatcgactacccgacctacgaagaagccgtagatctgggctggaacaaaaac

SEQ ID NO: 178 - protein, 400 aa, synthetic construct
  REGION 1..400: note = Variant of ERED chimera of Old Yellow Enzyme
MSFVKDFKPQALRDTNLFEPIKIGNTQLAHRVVMPPLTRMRATYPGNIPNKEWAAVYYGQRAQRPGTMIITEATFISPQAGGYDNKPGVWSDEQVAEWKNIFQAIHDCQSFAWVQLQVLGWAASPDNLARDGLRYDSASDNVYMNAEQEMKAKKANNPQHSITKDEIKQYVKEYVQAAKNSIEAGADGVEIHSANGYLLNQFLDPHSNNRTDEYGGSIENRARFTLEVVDAVVDAIGPEKVGLRLSPYGTFNSMSGGAEPGIVAQYAYVLGELERRAKAGKRLAFVHLVEPRVTDPSLVEGEGEYSEGTNDFAYSIWKGPIIRAGNYALHPEVVREQVKDPRTLIGYGRFFISNPDLVYRLEEGLPLNKYDRSTFYTMSAEGYIDYPTYEEAVDLGWNKN

SEQ ID NO: 179 - DNA, 1200 bp, synthetic construct
  misc_feature 1..1200: note = Variant of ERED chimera of Old Yellow Enzyme
  source 1..1200: mol_type = other DNA
atgtctttcgttaaggacttcaagccgcaagcactgcgcgacaccaacctgttcgaacctattaaaattgggaacacacagctggctcatcgcgccgtaatgcctccgctgacccgcatgcgcgctacccatccgggcaacattccgaacaaggagtgggctgcggtttactacggccagcgtgcacagcgtccggggacaatgattatcacggaggcgacgttcatcagcccgcaggcaggtgggtacgataacaagcctggtgtttggtcagacgaacaggttgccgaatggaagaacatcttccgtgctattcatcgttgtcagtcatttgcgtgggtgcaactgcaggtcctgggctgggccgccagcccggataccctggcgcgtgatgggttacgttacgattctgcctccgataatgtgtatatgaatgcggaacaggaggaaaaagcgaaaaaagctaacaatccgcaacatagcattactaaagacgaaattaaacaatatgtcaaagaatatgttcaggcagctaagaactcgatcgctgcgggtgcggacggcgtggaaattcactcagccaacggttatctgttaaatcagttcctggatccgcacagcaaccgccgcaccgatgagtatgggggctcaattgaaaatcgtgcacgttttactctggaagtcgttgacgcggtggttgatgccatcggcccagaaaaagtgggtttacgtctgagtccgtacggccgtttcaactctatgtcgggcggcgcggaaacgggcattgttgctcagtatgcctatgtcctgggtgagctggagcgtcgcgccaaggcggggaaacgcctggcgtttgttcatttagtcgaaccacgcgtgacagacccttctctggttgagggggagggcgaatactcagagggcactaacgattttgcttattccatttggaaaggtccgattatccgtgccggcaactatgcactacatcctgaagtagtgcgcgaacaagttaaggaccctcgcaccctgatcggctacggccgcttctttatttcaaatccagacctggtttaccgcttagaagaaggtctgccactgaacaagtatgaccgttctacgttctacaccatgagcgcggagggttacatcgactacccgacctacgaagaagccgtagatctgggctggaacaaaaac

SEQ ID NO: 180 - protein, 400 aa, synthetic construct
  REGION 1..400: note = Variant of ERED chimera of Old Yellow Enzyme
MSFVKDFKPQALRDTNLFEPIKIGNTQLAHRAVMPPLTRMRATHPGNIPNKEWAAVYYGQRAQRPGTMIITEATFISPQAGGYDNKPGVWSDEQVAEWKNIFRAIHRCQSFAWVQLQVLGWAASPDTLARDGLRYDSASDNVYMNAEQEEKAKKANNPQHSITKDEIKQYVKEYVQAAKNSIAAGADGVEIHSANGYLLNQFLDPHSNRRTDEYGGSIENRARFTLEVVDAVVDAIGPEKVGLRLSPYGRFNSMSGGAETGIVAQYAYVLGELERRAKAGKRLAFVHLVEPRVTDPSLVEGEGEYSEGTNDFAYSIWKGPIIRAGNYALHPEVVREQVKDPRTLIGYGRFFISNPDLVYRLEEGLPLNKYDRSTFYTMSAEGYIDYPTYEEAVDLGWNKN

SEQ ID NO: 181 - DNA, 1200 bp, synthetic construct
  misc_feature 1..1200: note = Variant of ERED chimera of Old Yellow Enzyme
  source 1..1200: mol_type = other DNA
atgtctttcgttaaggacttcaagccgcaagcactgcgcgacaccaacctgttcgaacctattaaaattgggaacacacagctggctcatcgcgccgtaatgcctccgctgacccgcatgcgcgctacccacccgggcaacattccgaacaaggagtgggctgcggtttactacggccagcgtgcacagcgtccggggacaatgattatcacggaggcgacgttcatcagcccgcaggcaggtgggtacgataacaagcctggtgtttggtcagacgaacaggttgccgaatggaagaacatcttcgcggctattcatcaatgtcagtcatttgcgtgggtgcaactgcaggtcctgggctgggccgccagcccggataccctggcgcgtgatgggttacgttacgattctgcctccgataatgtgtatatgaatgcggaacaggaggaaaaagcgaaaaaagctaacaatccgcaacatagcattactaaagacgaaattaaacaatatgtcaaagaatatgttcaggcagctaagaactcgatcgctgcgggtgcggacggcgtggaaattcactcagccaacggttatctgttaaatcagttcctggatccgcacagcaacaaccgcaccgatgagtatgggggctcaattgaaaatcgtgcacgttttactctggaagtcgttgacgcggtggttgatgccatcggcccagaaaaagtgggtttacgtctgagtccgtacggcacgttcaactctatgtcgggcggcgcggaaacgggcattgttgctcagtatgcctatgtcctgggtgagctggagcgtcgcgccaaggcggggaaacgcctggcgtttgttcatttagtcgaaccacgcgtgacagacccttctctggttgagggggagggcgaatactcagagggcactaacgattttgcttattccatttggaaaggtccgattatccgtgccggcaactatgcactacatcctgaagtagtgcgcgaacaagttaaggacccgcgcaccctgatcggctacggccgcttctttatttcaaatccagacctggtttaccgcttagaagaaggtctgccactgaacaagtatgaccgttctacgttctacaccatgagcgcggagggttacatcgactacccgacctacgaagaagccgtagatctgggctggaacaaaaac

SEQ ID NO: 182 - protein, 400 aa, synthetic construct
  REGION 1..400: note = Variant of ERED chimera of Old Yellow Enzyme
MSFVKDFKPQALRDTNLFEPIKIGNTQLAHRAVMPPLTRMRATHPGNIPNKEWAAVYYGQRAQRPGTMIITEATFISPQAGGYDNKPGVWSDEQVAEWKNIFAAIHQCQSFAWVQLQVLGWAASPDTLARDGLRYDSASDNVYMNAEQEEKAKKANNPQHSITKDEIKQYVKEYVQAAKNSIAAGADGVEIHSANGYLLNQFLDPHSNNRTDEYGGSIENRARFTLEVVDAVVDAIGPEKVGLRLSPYGTFNSMSGGAETGIVAQYAYVLGELERRAKAGKRLAFVHLVEPRVTDPSLVEGEGEYSEGTNDFAYSIWKGPIIRAGNYALHPEVVREQVKDPRTLIGYGRFFISNPDLVYRLEEGLPLNKYDRSTFYTMSAEGYIDYPTYEEAVDLGWNKN

SEQ ID NO: 183 - DNA, 1200 bp, synthetic construct
  misc_feature 1..1200: note = Variant of ERED chimera of Old Yellow Enzyme
  source 1..1200: mol_type = other DNA
atgtctttcgttaaggacttcaagccgcaagcactgcgcgacaccaacctgttcgaacctattaaaattgggaacacacagctggctcatcgcgccgtaatgcctccgctgacccgcatgcgcgctacccatccgggcaacattccgaacaaggagtgggctgcggtttactacggccagcgtgcacagcgtccggggacaatgattatcacggaggcgacgttcatcagcccgcaggcaggtgggtacgataacaagcctggtgtttggtcagacgaacaggttgccgaatggaagaacatcttcctggctattcatgactgtcagtcatttgcgtgggtgcaactgcaggtcctgggctgggccgccagcccggataacctggcgcgtgatgggttacgttacgattctgcctccgataatgtgtatatgaatgcggaacaggaggaaaaagcgaaaaaagctaacaatccgcaacatagcattactaaagacgaaattaaacaatatgtcaaagaatatgttcaggcagctaagaactcgatcgctgcgggtgcggacggcgtggaaattcactcagccaacggttatctgttaaatcagttcctggatccgcacagcaacaaccgcaccgatgagtatgggggctcaattgaaaatcgtgcacgttttactctggaagtcgttgacgcggtggttgatgccatcggcccagaaaaagtgggtttacgtctgagtccgtacggccgtttcaactctatgtcgggcggcgcggaaacgggcattgttgctcagtatgcctatgtcctgggtgagctggagcgtcgcgccaaggcggggaaacgcctggcgtttgttcatttagtcgaaccacgcgtgacagacccttctctggttgagggggagggcgaatactcagagggcactaacgattttgcttattccatttggaaaggtccgattatccgtgccggcaactatgcactacatcctgaagtagtgcgcgaacaagttaaggacccgcgcaccctgatcggctacggccgcttctttatttcaaatccagacctggtttaccgcttagaagaaggtctgccactgaacaagtatgaccgttctacgttctacaccatgagcgcggagggttacatcgactacccgacctacgaagaagccgtagatctgggctggaacaaaaac

SEQ ID NO: 184 - protein, 400 aa, synthetic construct
  REGION 1..400: note = Variant of ERED chimera of Old Yellow Enzyme
MSFVKDFKPQALRDTNLFEPIKIGNTQLAHRAVMPPLTRMRATHPGNIPNKEWAAVYYGQRAQRPGTMIITEATFISPQAGGYDNKPGVWSDEQVAEWKNIFLAIHDCQSFAWVQLQVLGWAASPDNLARDGLRYDSASDNVYMNAEQEEKAKKANNPQHSITKDEIKQYVKEYVQAAKNSIAAGADGVEIHSANGYLLNQFLDPHSNNRTDEYGGSIENRARFTLEVVDAVVDAIGPEKVGLRLSPYGRFNSMSGGAETGIVAQYAYVLGELERRAKAGKRLAFVHLVEPRVTDPSLVEGEGEYSEGTNDFAYSIWKGPIIRAGNYALHPEVVREQVKDPRTLIGYGRFFISNPDLVYRLEEGLPLNKYDRSTFYTMSAEGYIDYPTYEEAVDLGWNKN

SEQ ID NO: 185 - DNA, 1200 bp, synthetic construct
  misc_feature 1..1200: note = Variant of ERED chimera of Old Yellow Enzyme
  source 1..1200: mol_type = other DNA
atgtctttcgttaaggacttcaagccgcaagcactgcgcgacaccaacctgttcgaacctattaaaattgggaacacacagctggctcatcgcgccgtaatgcctccgctgacccgcatgcgcgctacccatccgggcaacattccgaacaaggagtgggctgcggtttactacggccagcgtgcacagcgtccggggacaatgattatcacggaggcgacgttcatcagcccgcaggcaggtgggtacgataacaagcctggtgtttggtcagacgaacaggttgccgaatggaagaacatcttcctggctattcatcgttgtcagtcatttgcgtgggtgcaactgcaggtcctgggctgggccgccagcccggataccctggcgcgtgatgggttacgttacgattctgcctccgataatgtgtatatgaatgcggaacaggaggaaaaagcgaaaaaagctaacaatccgcaacatagcattactaaagacgaaattaaacaatatgtcaaagaatatgttcaggcagctaagaactcgatcgctgcgggtgcggacggcgtggaaattcactcagccaacggttatctgttaaatcagttcctggatccgcacagcaaccgccgcaccgatgagtatgggggctcaattgaaaatcgtgcacgttttactctggaagtcgttgacgcggtggttgatgccatcggcccagaaaaagtgggtttacgtctgagtccgtacggcacgttcaactctatgtcgggcggcgcggaaacgggcattgttgctcagtatgcctatgtcctgggtgagctggagcgtcgcgccaaggcggggaaacgcctggcgtttgttcatttagtcgaaccacgcgtgacagacccttctctggttgagggggagggcgaatactcagagggcactaacgattttgcttattccatttggaaaggtccgattatccgtgccggcaactatgcactacatcctgaagtagtgcgcgaacaagttaaggaccctcgcaccctgatcggctacggccgcttctttatttcaaatccagacctggtttaccgcttagaagaaggtctgccactgaacaagtatgaccgttctacgttctacaccatgagcgcggagggttacatcgactacccgacctacgaagaagccgtagaactgggctggaacaaaaac

SEQ ID NO: 186 - protein, 400 aa, synthetic construct
  REGION 1..400: note = Variant of ERED chimera of Old Yellow Enzyme
MSFVKDFKPQALRDTNLFEPIKIGNTQLAHRAVMPPLTRMRATHPGNIPNKEWAAVYYGQRAQRPGTMIITEATFISPQAGGYDNKPGVWSDEQVAEWKNIFLAIHRCQSFAWVQLQVLGWAASPDTLARDGLRYDSASDNVYMNAEQEEKAKKANNPQHSITKDEIKQYVKEYVQAAKNSIAAGADGVEIHSANGYLLNQFLDPHSNRRTDEYGGSIENRARFTLEVVDAVVDAIGPEKVGLRLSPYGTFNSMSGGAETGIVAQYAYVLGELERRAKAGKRLAFVHLVEPRVTDPSLVEGEGEYSEGTNDFAYSIWKGPIIRAGNYALHPEVVREQVKDPRTLIGYGRFFISNPDLVYRLEEGLPLNKYDRSTFYTMSAEGYIDYPTYEEAVELGWNKN

SEQ ID NO: 187 - DNA, 1200 bp, synthetic construct
  misc_feature 1..1200: note = Variant of ERED chimera of Old Yellow Enzyme
  source 1..1200: mol_type = other DNA
atgtctttcgttaaggacttcaagccgcaagcactgcgcgacaccaacctgttcgaacctattaaaattgggaacacacagctggctcatcgcgccgtaatgcctccgctgacccgcatgcgcgctacccatccgggcaacattccgaacaaggagtgggctgcggtttactacggccagcgtgcacagcgtccggggacaatgattatcacggaggcgacgttcatcagcccgcaggcaggtgggtacgataacaagcctggtgtttggtcagacgaacaggttgccgaatggaagaacatcttccgtgctattcatcaatgtcagtcatttgcgtgggtgcaactgcaggtcctgggctgggccgccagcccggataacctggcgcgtgatgggttacgttacgattctgcctccgataatgtgtatatgaatgcggaacaggagatgaaagcgaaaaaagctaacaatccgcaacatagcattactaaagacgaaattaaacaatatgtcaaagaatatgttcaggcagctaagaactcgatcgctgcgggtgcggacggcgtggaaattcactcagccaacggttatctgttaaatcagttcctggatccgcacagcaacaaccgcaccgatgagtatgggggctcaattgaaaatcgtgcacgttttactctggaagtcgttgacgcggtggttgatgccatcggcccagaaaaagtgggtttacgtctgagtccgtacggccgtttcaactctatgtcgggcggcgcggaaacgggcattgttgctcagtatgcctatgtcctgggtgagctggagcgtcgcgccaaggcggggaaacgcctggcgtttgttcatttagtcgaaccacgcgtgacagacccttctctggttgagggggagggcgaatactcagagggcactaacgattttgcttattccatttggaaaggtccgattatccgtgccggcaactatgcactacatcctgaagtagtgcgcgaacaagttaaggacccgcgcaccctgatcggctacggccgcttctttatttcaaatccagacctggtttaccgcttagaagaaggtctgccactgaacaagtatgaccgttctacgttctacaccatgagcgcggagggttacatcgactacccgacctacgaagaagccgtagatctgggctggaacaaaaac

SEQ ID NO: 188 - protein, 400 aa, synthetic construct
  REGION 1..400: note = Variant of ERED chimera of Old Yellow Enzyme
MSFVKDFKPQALRDTNLFEPIKIGNTQLAHRAVMPPLTRMRATHPGNIPNKEWAAVYYGQRAQRPGTMIITEATFISPQAGGYDNKPGVWSDEQVAEWKNIFRAIHQCQSFAWVQLQVLGWAASPDNLARDGLRYDSASDNVYMNAEQEMKAKKANNPQHSITKDEIKQYVKEYVQAAKNSIAAGADGVEIHSANGYLLNQFLDPHSNNRTDEYGGSIENRARFTLEVVDAVVDAIGPEKVGLRLSPYGRFNSMSGGAETGIVAQYAYVLGELERRAKAGKRLAFVHLVEPRVTDPSLVEGEGEYSEGTNDFAYSIWKGPIIRAGNYALHPEVVREQVKDPRTLIGYGRFFISNPDLVYRLEEGLPLNKYDRSTFYTMSAEGYIDYPTYEEAVDLGWNKN

SEQ ID NO: 189 - DNA, 1200 bp, synthetic construct
  misc_feature 1..1200: note = Variant of ERED chimera of Old Yellow Enzyme
  source 1..1200: mol_type = other DNA
atgtctttcgttaaggacttcaagccgcaagcactgcgcgacaccaacctgttcgaacctattaaaattgggaacacacagctggctcatcgcgtcgtaatgcctccgctgacccgcatgcgcgctacctacccgggcaacattccgaacaaggagtgggctgcggtttactacggccagcgtgcacagcgtccggggacaatgattatcacggaggcgacgttcatcagcccgcaggcaggtgggtacgataacaagcctggtgtttggtcagacgaacaggttgccgaatggaagaacatcttccaggctattcatcaatgtcagtcatttgcgtgggtgcaactgcaggtcctgggctgggccgccagcccggataacctggcgcgtgatgggttacgttacgattctgcctccgataatgtgtatatgaatgcggaacaggaggaaaaagcgaaaaaagctaacaatccgcaacatagcattactaaagacgaaattaaacaatatgtcaaagaatatgttcaggcagctaagaactcgatcgctgcgggtgcggacggcgtggaaattcactcagccaacggttatctgttaaatcagttcctggatccgcacagcaacaaccgcaccgatgagtatgggggctcaattgaaaatcgtgcacgttttactctggaagtcgttgacgcggtggttgatgccatcggcccagaaaaagtgggtttacgtctgagtccgtacggcacgttcaactctatgtcgggcggcgcggaaacgggcattgttgctcagtatgcctatgtcctgggtgagctggagcgtcgcgccaaggcggggaaacgcctggcgtttgttcatttagtcgaaccacgcgtgacagacccttctctggttgagggggagggcgaatactcagagggcactaacgattttgcttattccatttggaaaggtccgattatccgtgccggcaactatgcactacatcctgaagtagtgcgcgaacaagttaaggaccctcgcaccctgatcggctacggccgcttctttatttcaaatccagacctggtttaccgcttagaagaaggtctgccactgaacaagtatgaccgttctacgttctacaccatgagcgcggagggttacatcgactacccgacctacgaagaagccgtagatctgggctggaacaaaaac

SEQ ID NO: 190 - protein, 400 aa, synthetic construct
  REGION 1..400: note = Variant of ERED chimera of Old Yellow Enzyme
MSFVKDFKPQALRDTNLFEPIKIGNTQLAHRVVMPPLTRMRATYPGNIPNKEWAAVYYGQRAQRPGTMIITEATFISPQAGGYDNKPGVWSDEQVAEWKNIFQAIHQCQSFAWVQLQVLGWAASPDNLARDGLRYDSASDNVYMNAEQEEKAKKANNPQHSITKDEIKQYVKEYVQAAKNSIAAGADGVEIHSANGYLLNQFLDPHSNNRTDEYGGSIENRARFTLEVVDAVVDAIGPEKVGLRLSPYGTFNSMSGGAETGIVAQYAYVLGELERRAKAGKRLAFVHLVEPRVTDPSLVEGEGEYSEGTNDFAYSIWKGPIIRAGNYALHPEVVREQVKDPRTLIGYGRFFISNPDLVYRLEEGLPLNKYDRSTFYTMSAEGYIDYPTYEEAVDLGWNKN

SEQ ID NO: 191 - DNA, 1200 bp, synthetic construct
  misc_feature 1..1200: note = Variant of ERED chimera of Old Yellow Enzyme
  source 1..1200: mol_type = other DNA
atgtctttcgttaaggacttcaagccgcaagcactgcgcgacaccaacctgttcgaacctattaaaattgggaacacacagctggctcatcgcgccgtaatgcctccgctgacccgcatgcgcgctacctacccgggcaacattccgaacaaggagtgggctgcggtttactacggccagcgtgcacagcgtccggggacaatgattatcacggaggcgacgttcatcagcccgcaggcaggtgggtacgataacaagcctggtgtttggtcagacgaacaggttgccgaatggaagaacatcttccaggctattcatcgttgtcagtcatttgcgtgggtgcaactgcaggtcctgggctgggccgccagcccggataacctggcgcgtgatgggttacgttacgattctgcctccgataatgtgtatatgaatgcggaacaggaggaaaaagcgaaaaaagctaacaatccgcaacatagcattactaaagacgaaattaaacaatatgtcaaagaatatgttcaggcagctaagaactcgatcgctgcgggtgcggacggcgtggaaattcactcagccaacggttatctgttaaatcagttcctggatccgcacagcaacaaccgcaccgatgagtatgggggctcaattgaaaatcgtgcacgttttactctggaagtcgttgacgcggtggttgatgccatcggcccagaaaaagtgggtttacgtctgagtccgtacggcacgttcaactctatgtcgggcggcgcggaaacgggcattgttgctcagtatgcctatgtcctgggtgagctggagcgtcgcgccaaggcggggaaacgcctggcgtttgttcatttagtcgaaccacgcgtgacagacccttctctggttgagggggagggcgaatactcagagggcactaacgattttgcttattccatttggaaaggtccgattatccgtgccggcaactatgcactacatcctgaagtagtgcgcgaacaagttaaggacgggcgcaccctgatcggctacggccgcttctttatttcaaatccagacctggtttaccgcttagaagaaggtctgccactgaacaagtatgaccgttctacgttctacaccatgagcgcggagggttacatcgactacccgacctacgaagaagccgtagaactgggctggaacaaaaac

SEQ ID NO: 192 - protein, 400 aa, synthetic construct
  REGION 1..400: note = Variant of ERED chimera of Old Yellow Enzyme
MSFVKDFKPQALRDTNLFEPIKIGNTQLAHRAVMPPLTRMRATYPGNIPNKEWAAVYYGQRAQRPGTMIITEATFISPQAGGYDNKPGVWSDEQVAEWKNIFQAIHRCQSFAWVQLQVLGWAASPDNLARDGLRYDSASDNVYMNAEQEEKAKKANNPQHSITKDEIKQYVKEYVQAAKNSIAAGADGVEIHSANGYLLNQFLDPHSNNRTDEYGGSIENRARFTLEVVDAVVDAIGPEKVGLRLSPYGTFNSMSGGAETGIVAQYAYVLGELERRAKAGKRLAFVHLVEPRVTDPSLVEGEGEYSEGTNDFAYSIWKGPIIRAGNYALHPEVVREQVKDGRTLIGYGRFFISNPDLVYRLEEGLPLNKYDRSTFYTMSAEGYIDYPTYEEAVELGWNKN

SEQ ID NO: 193 - DNA, 1200 bp, synthetic construct
  misc_feature 1..1200: note = Variant of ERED chimera of Old Yellow Enzyme
  source 1..1200: mol_type = other DNA
atgtctttcgttaaggacttcaagccgcaagcactgcgcgacaccaacctgttcgaacctattaaaattgggaacacacagctggctcatcgcgtcgtaatgcctccgctgacccgcatgcgcgctacctacccgggcaacattccgaacaaggagtgggctgcggtttactacggccagcgtgcacagcgtccggggacaatgattatcacggaggcgacgttcatcagcccgcaggcaggtgggtacgataacaagcctggtgtttggtcagacgaacaggttgccgaatggaagaacatcttcacggctattcatgactgtcagtcatttgcgtgggtgcaactgcaggtcctgggctgggccgccagcccggataccctggcgcgtgatgggttacgttacgattctgcctccgataatgtgtatatgaatgcggaacaggaggaaaaagcgaaaaaagctaacaatccgcaacatagcattactaaagacgaaattaaacaatatgtcaaagaatatgttcaggcagctaagaactcgatcgctgcgggtgcggacggcgtggaaattcactcagccaacggttatctgttaaatcagttcctggatccgcacagcaacaaccgcaccgatgagtatgggggctcaattgaaaatcgtgcacgttttactctggaagtcgttgacgcggtggttgatgccatcggcccagaaaaagtgggtttacgtctgagtccgtacggccgtttcaactctatgtcgggcggcgcggaaacgggcattgttgctcagtatgcctatgtcctgggtgagctggagcgtcgcgccaaggcggggaaacgcctggcgtttgttcatttagtcgaaccacgcgtgacagacccttctctggttgagggggagggcgaatactcagagggcactaacgattttgcttattccatttggaaaggtccgattatccgtgccggcaactatgcactacatcctgaagtagtgcgcgaacaagttaaggacccgcgcaccctgatcggctacggccgcttctttatttcaaatccagacctggtttaccgcttagaagaaggtctgccactgaacaagtatgaccgttctacgttctacaccatgagcgcggagggttacatcgactacccgacctacgaagaagccgtagaactgggctggaacaaaaac

SEQ ID NO: 194 - protein, 400 aa, synthetic construct
  REGION 1..400: note = Variant of ERED chimera of Old Yellow Enzyme
MSFVKDFKPQALRDTNLFEPIKIGNTQLAHRVVMPPLTRMRATYPGNIPNKEWAAVYYGQRAQRPGTMIITEATFISPQAGGYDNKPGVWSDEQVAEWKNIFTAIHDCQSFAWVQLQVLGWAASPDTLARDGLRYDSASDNVYMNAEQEEKAKKANNPQHSITKDEIKQYVKEYVQAAKNSIAAGADGVEIHSANGYLLNQFLDPHSNNRTDEYGGSIENRARFTLEVVDAVVDAIGPEKVGLRLSPYGRFNSMSGGAETGIVAQYAYVLGELERRAKAGKRLAFVHLVEPRVTDPSLVEGEGEYSEGTNDFAYSIWKGPIIRAGNYALHPEVVREQVKDPRTLIGYGRFFISNPDLVYRLEEGLPLNKYDRSTFYTMSAEGYIDYPTYEEAVELGWNKN

SEQ ID NO: 195 - DNA, 1200 bp, synthetic construct
  misc_feature 1..1200: note = Variant of ERED chimera of Old Yellow Enzyme
  source 1..1200: mol_type = other DNA
atgtctttcgttaaggacttcaagccgcaagcactgcgcgacaccaacctgttcgaacctattaaaattgggaacacacagctggctcatcgcgccgtaatgcctccgctgacccgcatgcgcgctacccatccgggcaacattccgaacaaggagtgggctgcggtttactacggccagcgtgcacagcgtccggggacaatgattatcacggaggcgacgttcatcagcccgcaggcaggtgggtacgataacaagcctggtgtttggtcagacgaacaggttgccgaatggaagaacatcttccgtgctattcatgagtgtcagtcatttgcgtgggtgcaactgcaggtcctgggctgggccgccagcccggataccctggcgcgtgatgggttacgttacgattctgcctccgataatgtgtatatgaatgcggaacaggaggaaaaagcgaaaaaagctaacaatccgcaacatagcattactaaagacgaaattaaacaatatgtcaaagaatatgttcaggcagctaagaactcgatcgctgcgggtgcggacggcgtggaaattcactcagccaacggttatctgttaaatcagttcctggatccgcacagcaacaaccgcaccgatgagtatgggggctcaattgaaaatcgtgcacgttttactctggaagtcgttgacgcggtggttgatgccatcggcccagaaaaagtgggtttacgtctgagtccgtacggccgtttcaactctatgtcgggcggcgcggaaacgggcattgttgctcagtatgcctatgtcctgggtgagctggagcgtcgcgccaaggcggggaaacgcctggcgtttgttcatttagtcgaaccacgcgtgacagacccttctctggttgagggggagggcgaatactcagagggcactaacgattttgcttattccatttggaaaggtccgattatccgtgccggcaactatgcactacatcctgaagtagtgcgcgaacaagttaaggaccctcgcaccctgatcggctacggccgcttctttatttcaaatccagacctggtttaccgcttagaagaaggtctgccactgaacaagtatgaccgttctacgttctacaccatgagcgcggagggttacatcgactacccgacctacgaagaagccgtagaactgggctggaacaaaaac

SEQ ID NO: 196 - protein, 400 aa, synthetic construct
  REGION 1..400: note = Variant of ERED chimera of Old Yellow Enzyme
MSFVKDFKPQALRDTNLFEPIKIGNTQLAHRAVMPPLTRMRATHPGNIPNKEWAAVYYGQRAQRPGTMIITEATFISPQAGGYDNKPGVWSDEQVAEWKNIFRAIHECQSFAWVQLQVLGWAASPDTLARDGLRYDSASDNVYMNAEQEEKAKKANNPQHSITKDEIKQYVKEYVQAAKNSIAAGADGVEIHSANGYLLNQFLDPHSNNRTDEYGGSIENRARFTLEVVDAVVDAIGPEKVGLRLSPYGRFNSMSGGAETGIVAQYAYVLGELERRAKAGKRLAFVHLVEPRVTDPSLVEGEGEYSEGTNDFAYSIWKGPIIRAGNYALHPEVVREQVKDPRTLIGYGRFFISNPDLVYRLEEGLPLNKYDRSTFYTMSAEGYIDYPTYEEAVELGWNKN

SEQ ID NO: 197 - DNA, 1200 bp, synthetic construct
  misc_feature 1..1200: note = Variant of ERED chimera of Old Yellow Enzyme
  source 1..1200: mol_type = other DNA
atgtctttcgttaaggacttcaagccgcaagcactgcgcgacaccaacctgttcgaacctattaaaattgggaacacacagctggctcatcgcgccgtaatgcctccgctgacccgcatgcgcgctacccatccgggcaacattccgaacaaggagtgggctgcggtttactacggccagcgtgcacagcgtccggggacaatgattatcacggaggcgacgttcatcagcccgcaggcaggtgggtacgataacaagcctggtgtttggtcagacgaacaggttgccgaatggaagaacatcttcacggctattcatcgttgtcagtcatttgcgtgggtgcaactgcaggtcctgggctgggccgccagcccggataccctggcgcgtgatgggttacgttacgattctgcctccgataatgtgtatatgaatgcggaacaggaggaaaaagcgaaaaaagctaacaatccgcaacatagcattactaaagacgaaattaaacaatatgtcaaagaatatgttcaggcagctaagaactcgatcgaggcgggtgcggacggcgtggaaattcactcagccaacggttatctgttaaatcagttcctggatccgcacagcaacaaccgcaccgatgagtatgggggctcaattgaaaatcgtgcacgttttactctggaagtcgttgacgcggtggttgatgccatcggcccagaaaaagtgggtttacgtctgagtccgtacggccgtttcaactctatgtcgggcggcgcggaaacgggcattgttgctcagtatgcctatgtcctgggtgagctggagcgtcgcgccaaggcggggaaacgcctggcgtttgttcatttagtcgaaccacgcgtgacagacccttctctggttgagggggagggcgaatactcagagggcactaacgattttgcttattccatttggaaaggtccgattatccgtgccggcaactatgcactacatcctgaagtagtgcgcgaacaagttaaggacccgcgcaccctgatcggctacggccgcttctttatttcaaatccagacctggtttaccgcttagaagaaggtctgccactgaacaagtatgaccgttctacgttctacaccatgagcgcggagggttacatcgactacccgacctacgaagaagccgtagatctgggctggaacaaaaac

SEQ ID NO: 198 - protein, 400 aa, synthetic construct
  REGION 1..400: note = Variant of ERED chimera of Old Yellow Enzyme
MSFVKDFKPQALRDTNLFEPIKIGNTQLAHRAVMPPLTRMRATHPGNIPNKEWAAVYYGQRAQRPGTMIITEATFISPQAGGYDNKPGVWSDEQVAEWKNIFTAIHRCQSFAWVQLQVLGWAASPDTLARDGLRYDSASDNVYMNAEQEEKAKKANNPQHSITKDEIKQYVKEYVQAAKNSIEAGADGVEIHSANGYLLNQFLDPHSNNRTDEYGGSIENRARFTLEVVDAVVDAIGPEKVGLRLSPYGRFNSMSGGAETGIVAQYAYVLGELERRAKAGKRLAFVHLVEPRVTDPSLVEGEGEYSEGTNDFAYSIWKGPIIRAGNYALHPEVVREQVKDPRTLIGYGRFFISNPDLVYRLEEGLPLNKYDRSTFYTMSAEGYIDYPTYEEAVDLGWNKN

SEQ ID NO: 199 - DNA, 1200 bp, synthetic construct
  misc_feature 1..1200: note = Variant of ERED chimera of Old Yellow Enzyme
  source 1..1200: mol_type = other DNA
atgtctttcgttaaggacttcaagccgcaagcactgcgcgacaccaacctgttcgaacctattaaaattgggaacacacagctggctcatcgcgtcgtaatgcctccgctgacccgcatgcgcgctacccatccgggcaacattccgaacaaggagtgggctgcggtttactacggccagcgtgcacagcgtccggggacaatgattatcacggaggcgacgttcatcagcccgcaggcaggtgggtacgataacaagcctggtgtttggtcagacgaacaggttgccgaatggaagaacatcttccgtgctattcatcaatgtcagtcatttgcgtgggtgcaactgcaggtcctgggctgggccgccagcccggataccctggcgcgtgatgggttacgttacgattctgcctccgataatgtgtatatgaatgcggaacaggaggaaaaagcgaaaaaagctaacaatccgcaacatagcattactaaagacgaaattaaacaatatgtcaaagaatatgttcaggcagctaagaactcgatcgctgcgggtgcggacggcgtggaaattcactcagccaacggttatctgttaaatcagttcctggatccgcacagcaacaaccgcaccgatgagtatgggggctcaattgaaaatcgtgcacgttttactctggaagtcgttgacgcggtggttgatgccatcggcccagaaaaagtgggtttacgtctgagtccgtacggccgtttcaactctatgtcgggcggcgcggaaacgggcattgttgctcagtatgcctatgtcctgggtgagctggagcgtcgcgccaaggcggggaaacgcctggcgtttgttcatttagtcgaaccacgcgtgacagacccttctctggttgagggggagggcgaatactcagagggcactaacgattttgcttattccatttggaaaggtccgattatccgtgccggcaactatgcactacatcctgaagtagtgcgcgaacaagttaaggacccgcgcaccctgatcggctacggccgcttctttatttcaaatccagacctggtttaccgcttagaagaaggtctgccactgaacaagtatgaccgttctacgttctacaccatgagcgcggagggttacatcgactacccgacctacgaagaagccgtagatctgggctggaacaaaaac

SEQ ID NO: 200 - protein, 400 aa, synthetic construct
  REGION 1..400: note = Variant of ERED chimera of Old Yellow Enzyme
MSFVKDFKPQALRDTNLFEPIKIGNTQLAHRVVMPPLTRMRATHPGNIPNKEWAAVYYGQRAQRPGTMIITEATFISPQAGGYDNKPGVWSDEQVAEWKNIFRAIHQCQSFAWVQLQVLGWAASPDTLARDGLRYDSASDNVYMNAEQEEKAKKANNPQHSITKDEIKQYVKEYVQAAKNSIAAGADGVEIHSANGYLLNQFLDPHSNNRTDEYGGSIENRARFTLEVVDAVVDAIGPEKVGLRLSPYGRFNSMSGGAETGIVAQYAYVLGELERRAKAGKRLAFVHLVEPRVTDPSLVEGEGEYSEGTNDFAYSIWKGPIIRAGNYALHPEVVREQVKDPRTLIGYGRFFISNPDLVYRLEEGLPLNKYDRSTFYTMSAEGYIDYPTYEEAVDLGWNKN

SEQ ID NO: 201 - DNA, 1200 bp, synthetic construct
  misc_feature 1..1200: note = Variant of ERED chimera of Old Yellow Enzyme
  source 1..1200: mol_type = other DNA
atgtctttcgttaaggacttcaagccgcaagcactgcgcgacaccaacctgttcgaacctattaaaattgggaacacacagctggctcatcgcgtcgtaatgcctccgctgacccgcatgcgcgctacccacccgggcaacattccgaacaaggagtgggctgcggtttactacggccagcgtgcacagcgtccggggacaatgattatcacggaggcgacgttcatcagcccgcaggcaggtgggtacgataacaagcctggtgtttggtcagacgaacaggttgccgaatggaagaacatcttccgtgctattcatcgttgtcagtcatttgcgtgggtgcaactgcaggtcctgggctgggccgccagcccggataacctggcgcgtgatgggttacgttacgattctgcctccgataatgtgtatatgaatgcggaacaggagatgaaagcgaaaaaagctaacaatccgcaacatagcattactaaagacgaaattaaacaatatgtcaaagaatatgttcaggcagctaagaactcgatcgctgcgggtgcggacggcgtggaaattcactcagccaacggttatctgttaaatcagttcctggatccgcacagcaacaaccgcaccgatgagtatgggggctcaattgaaaatcgtgcacgttttactctggaagtcgttgacgcggtggttgatgccatcggcccagaaaaagtgggtttacgtctgagtccgtacggcactttcaactctatgtcgggcggcgcggaaacgggcattgttgctcagtatgcctatgtcctgggtgagctggagcgtcgcgccaaggcggggaaacgcctggcgtttgttcatttagtcgaaccacgcgtgacagacccttctctggttgagggggagggcgaatactcagagggcactaacgattttgcttattccatttggaaaggtccgattatccgtgccggcaactatgcactacatcctgaagtagtgcgcgaacaagttaaggacccgcgcaccctgatcggctacggccgcttctttatttcaaatccagacctggtttaccgcttagaagaaggtctgccactgaacaagtatgaccgttctacgttctacaccatgagcgcggagggttacatcgactacccgacctacgaagaagccgtagatctgggctggaacaaaaac

SEQ ID NO: 202 - protein, 400 aa, synthetic construct
  REGION 1..400: note = Variant of ERED chimera of Old Yellow Enzyme
MSFVKDFKPQALRDTNLFEPIKIGNTQLAHRVVMPPLTRMRATHPGNIPNKEWAAVYYGQRAQRPGTMIITEATFISPQAGGYDNKPGVWSDEQVAEWKNIFRAIHRCQSFAWVQLQVLGWAASPDNLARDGLRYDSASDNVYMNAEQEMKAKKANNPQHSITKDEIKQYVKEYVQAAKNSIAAGADGVEIHSANGYLLNQFLDPHSNNRTDEYGGSIENRARFTLEVVDAVVDAIGPEKVGLRLSPYGTFNSMSGGAETGIVAQYAYVLGELERRAKAGKRLAFVHLVEPRVTDPSLVEGEGEYSEGTNDFAYSIWKGPIIRAGNYALHPEVVREQVKDPRTLIGYGRFFISNPDLVYRLEEGLPLNKYDRSTFYTMSAEGYIDYPTYEEAVDLGWNKN

SEQ ID NO: 203 - DNA, 1200 bp, synthetic construct
  misc_feature 1..1200: note = Variant of ERED chimera of Old Yellow Enzyme
  source 1..1200: mol_type = other DNA
atgtctttcgttaaggacttcaagccgcaagcactgcgcgacaccaacctgttcgaacctattaaaattgggaacacacagctggctcatcgcgttgtaatgcctccgctgacccgcatgcgcgctacccatccgggcaacattccgaacaaggagtgggctgcggtttactacggccagcgtgcacagcgtccggggacaatgattatcacggaggcgacgttcatcagcccgcaggcaggtgggtacgataacaagcctggtgtttggtcagacgaacaggttgccgaatggaagaacatcttcctggctattcatgactgtcagtcatttgcgtgggtgcaactgcaggtcctgggctgggccgcctttccggataccctggcgcgtgatgggttacgttacgattctgcctccgataatgtgtatatgaatgcggaacaggaggaaaaagcgaaaaaagctaacaatccgcaacatagcattactaaagacgaaattaaacaatatgtcaaagaatatgttcaggcagctaagaactcgatcgctgcgggtgcggacggcgtggaaattcactcagccaacggttatctgttaaatcagttcctggatccgcacagcaacaaccgcaccgatgagtatgggggctcaattgaaaatcgtgcacgttttactctggaagtcgttgacgcggtggttgatgccatcggcccagaaaaagtgggtttacgtctgagtccgtacggcacgttcaactctatgtcgggcggcgcggaaacgtgtattgttgctcagtatgcctatgtcctgggtgagctggagcgtcgcgccaaggcggggaaacgcctggcgtttgttcatttagtcgaaccacgcgtgacagacccttctaaggttgagggggagggcgaatactcagagggcactaacgattttgcttattccatttggaaaggtccgattatccgtgccggcaactatgcactacatcctgaagtagtgcgcgaacaagttaaggaccctcgcaccctgatcggctacggccgcttctttatttcaaatccagacctggtttaccgcttagaagaaggtctgccactgaacaagtatgaccgttctacgttctacaccatgagcgcggagggttacatcgactacccgacctacgaagaagccgtagatctgggctggaacaaaaac

SEQ ID NO: 204 - protein, 400 aa, synthetic construct
  REGION 1..400: note = Variant of ERED chimera of Old Yellow Enzyme
MSFVKDFKPQALRDTNLFEPIKIGNTQLAHRVVMPPLTRMRATHPGNIPNKEWAAVYYGQRAQRPGTMIITEATFISPQAGGYDNKPGVWSDEQVAEWKNIFLAIHDCQSFAWVQLQVLGWAAFPDTLARDGLRYDSASDNVYMNAEQEEKAKKANNPQHSITKDEIKQYVKEYVQAAKNSIAAGADGVEIHSANGYLLNQFLDPHSNNRTDEYGGSIENRARFTLEVVDAVVDAIGPEKVGLRLSPYGTFNSMSGGAETCIVAQYAYVLGELERRAKAGKRLAFVHLVEPRVTDPSKVEGEGEYSEGTNDFAYSIWKGPIIRAGNYALHPEVVREQVKDPRTLIGYGRFFISNPDLVYRLEEGLPLNKYDRSTFYTMSAEGYIDYPTYEEAVDLGWNKN

SEQ ID NO: 205 - DNA, 1200 bp, synthetic construct
  misc_feature 1..1200: note = Variant of ERED chimera of Old Yellow Enzyme
  source 1..1200: mol_type = other DNA
atgtctttcgttaaggacgggaagccgcaagcactgcgcgacaccaacctgttcgaacctattaaaattgggaacacacagctggctcatcgcgttgtaatgcctccgctgacccgcatgcgcgctacccatccgggcaacattccgaacaaggagtgggctgcggtttactacggccagcgtgcacagcgtccggggacaatgattatcacggaggcgacgttcatcagcccgcaggcaggtgggtacgataacaagcctggtgtttggtcagacgaacaggttgccgaatggaagaacatcttcctggctattcatgactgtcagtcatttgcgtgggtgcaactgcaggtcctgggctgggccgcctttccggataccctggcgcgtgatgggttacgttacgattctgcctccgataatgtgtatatgaatgcggaacaggaggaaaaagcgaaaaaagctaacaatccgcaacatagcattactaaagacgaaattaaacaatatgtcaaagaatatgttcaggcagctaagaactcgatcgctgcgggtgcggacggcgtggaaattcactcagccaacggttatctgttaaatcagttcctggatccgcacagcaacaaccgcaccgatgagtatgggggctcaattgaaaatcgtgcacgttttactctggaagtcgttgacgcggtggttgatgccatcggcccagaaaaagtgggtttacgtctgagtccgtacggcacgttcaactctatgtcgggcggcgcggaaacgtgtattgttgctcagtatgcctatgtcctgggtgagctggagcgtcgcgccaaggcggggaaacgcctggcgtttgttcatttagtcgaaccacgcgtgacagacccttctctggttgagggggagggcgaatactcagagggcactaacgattttgcttattccatttggaaaggtccgattatccgtgccggcaactatgcactacatcctgaagtagtgcgcgaacaagttaaggaccctcgcaccctgatcggctacggccgcttctttatttcaaatccagacctggtttaccgcttagaagaaggtctgccactgaacaagtatgaccgttctacgttctacaccatgagcgcggagggttacatcgactacccgacctacgaagaagccgtagatctgggctggaacaaaaac

SEQ ID NO: 206 - protein, 400 aa, synthetic construct
  REGION 1..400: note = Variant of ERED chimera of Old Yellow Enzyme
MSFVKDGKPQALRDTNLFEPIKIGNTQLAHRVVMPPLTRMRATHPGNIPNKEWAAVYYGQRAQRPGTMIITEATFISPQAGGYDNKPGVWSDEQVAEWKNIFLAIHDCQSFAWVQLQVLGWAAFPDTLARDGLRYDSASDNVYMNAEQEEKAKKANNPQHSITKDEIKQYVKEYVQAAKNSIAAGADGVEIHSANGYLLNQFLDPHSNNRTDEYGGSIENRARFTLEVVDAVVDAIGPEKVGLRLSPYGTFNSMSGGAETCIVAQYAYVLGELERRAKAGKRLAFVHLVEPRVTDPSLVEGEGEYSEGTNDFAYSIWKGPIIRAGNYALHPEVVREQVKDPRTLIGYGRFFISNPDLVYRLEEGLPLNKYDRSTFYTMSAEGYIDYPTYEEAVDLGWNKN

SEQ ID NO: 207 - DNA, 1200 bp, synthetic construct
  misc_feature 1..1200: note = Variant of ERED chimera of Old Yellow Enzyme
  source 1..1200: mol_type = other DNA
atgtctttcgttaaggacttcaagccgcaagcactgcgcgacaccaacctgttcgaacctattaaaattgggaacacacagctggctcatcgcgttgtaatgcctccgctgacccgcatgcgcgctacccatccgggcaacattccgaacaaggagtgggctgcggtttactacggccagcgtgcacagcgtccggggacaatgattatcacggaggcgacgttcatcagcccgcaggcaggtgggtacgataacaagcctggtgtttggtcagacgaacaggttgccgaatggaagaacatcttcctggctattcatgactgtcagtcatttgcgtgggtgcaactgcaggtcctgggctgggccgcctttccggataccctggcgcgtgatgggttacgttacgattctgcctccgataatgtgtatatgaatgcggaacaggaggaaaaagcgaaaaaagctaacaatccgcaacatagcattactaaagacgaaattaaacaatatgtcaaagaatatgttcaggcagctaagaactcgatcgctgcgggtgcggacggcgtggaaattcactcagccaacggttatctgttaaatcagttcctggatccgcacagcaacaaccgcaccgatgagtatgggggctcaattgaaaatcgtgcacgttttactctggaagtcgttgacgcggtggttgatgccatcggcccagaaaaagtgggtttacgtctgagtccgtacggcacgttcaactctatgtcgggcggcgcggaaacgtgtattgttgctcagtatgcctatgtcctgggtgagctggagcgtcgcgccaaggcggggaaacgcctggcgtttgttcatttagtcgaaccacgcgtgacagacccttctctggttgagggggagggcgaatactcagagggcactaacgattttgcttattccatttggaaaggtccgattatccgtgccggcaactatgcactacatcctgaagtagtgcgcgaacaagttaaggaccctcgcaccctgatcggctacggccgcttctttatttcaaatccagacctggtttaccgcttagaagaaggtctgccactgaacaagtatgaccgttctacgttctacaccacgagcgcggagggttacatcgactacccgacctacgaagaagccgtagatctgggctggaacaaaaac

SEQ ID NO: 208 - protein, 400 aa, synthetic construct
  REGION 1..400: note = Variant of ERED chimera of Old Yellow Enzyme
MSFVKDFKPQALRDTNLFEPIKIGNTQLAHRVVMPPLTRMRATHPGNIPNKEWAAVYYGQRAQRPGTMIITEATFISPQAGGYDNKPGVWSDEQVAEWKNIFLAIHDCQSFAWVQLQVLGWAAFPDTLARDGLRYDSASDNVYMNAEQEEKAKKANNPQHSITKDEIKQYVKEYVQAAKNSIAAGADGVEIHSANGYLLNQFLDPHSNNRTDEYGGSIENRARFTLEVVDAVVDAIGPEKVGLRLSPYGTFNSMSGGAETCIVAQYAYVLGELERRAKAGKRLAFVHLVEPRVTDPSLVEGEGEYSEGTNDFAYSIWKGPIIRAGNYALHPEVVREQVKDPRTLIGYGRFFISNPDLVYRLEEGLPLNKYDRSTFYTTSAEGYIDYPTYEEAVDLGWNKN

SEQ ID NO: 209 - DNA, 1200 bp, synthetic construct
  misc_feature 1..1200: note = Variant of ERED chimera of Old Yellow Enzyme
  source 1..1200: mol_type = other DNA
atgtctttcgttaaggacttcaagccgcaagcactgcgcgacaccaacctgttcgaacctattaaaattgggaacacacagctggctcatcgcgttgtaatgcctccgctgacccgcatgcgcgctacccatccgggcaacattccgaacaaggagtgggctgcggtttactacggccagcgtgcacagcgtccggggacaatgattatcacggaggcgacgttcatcagcccgcaggcaggtgggtacgataacaagcctggtgtttggtcagacgaacaggttgccgaatggaagaacatcttcctggctattcatgactgtcagtcatttgcgtgggtgcaactgcaggtcctgggctgggccgcctttccggatgttctggcgcgtgatgggttacgttacgattctgcctccgataatgtgtatatgaatgcggaacaggaggaaaaagcgaaaaaagctaacaatccgcaacatagcattactaaagacgaaattaaacaatatgtcaaagaatatgttcaggcagctaagaactcgatcgctgcgggtgcggacggcgtggaaattcactcagccaacggttatctgttaaatcagttcctggatccgcacagcaacaaccgcaccgatgagtatgggggctcaattgaaaatcgtgcacgttttactctggaagtcgttgacgcggtggttgatgccatcggcccagaaaaagtgggtttacgtctgagtccgtacggcacgttcaactctatgtcgggcggcgcggaaacgtgtattgttgctcagtatgcctatgtcctgggtgagctggagcgtcgcgccaaggcggggaaacgcctggcgtttgttcatttagtcgaaccacgcgtgacagacccttctctggttgagggggagggcgaatactcagagggcactaacgattttgcttattccatttggaaaggtccgattatccgtgccggcaactatgcactacatcctgaagtagtgcgcgaacaagttaaggaccctcgcaccctgatcggctacggccgcttctttatttcaaatccagacctggtttaccgcttagaagaaggtctgccactgaacaagtatgaccgttctacgttctacaccatgagcgcggagggttacatcgactacccgacctacgaagaagccgtagatctgggctggaacaaaaac

SEQ ID NO: 210 - protein, 400 aa, synthetic construct
  REGION 1..400: note = Variant of ERED chimera of Old Yellow Enzyme
MSFVKDFKPQALRDTNLFEPIKIGNTQLAHRVVMPPLTRMRATHPGNIPNKEWAAVYYGQRAQRPGTMIITEATFISPQAGGYDNKPGVWSDEQVAEWKNIFLAIHDCQSFAWVQLQVLGWAAFPDVLARDGLRYDSASDNVYMNAEQEEKAKKANNPQHSITKDEIKQYVKEYVQAAKNSIAAGADGVEIHSANGYLLNQFLDPHSNNRTDEYGGSIENRARFTLEVVDAVVDAIGPEKVGLRLSPYGTFNSMSGGAETCIVAQYAYVLGELERRAKAGKRLAFVHLVEPRVTDPSLVEGEGEYSEGTNDFAYSIWKGPIIRAGNYALHPEVVREQVKDPRTLIGYGRFFISNPDLVYRLEEGLPLNKYDRSTFYTMSAEGYIDYPTYEEAVDLGWNKN

SEQ ID NO: 211 - DNA, 1200 bp, synthetic construct
  misc_feature 1..1200: note = Variant of ERED chimera of Old Yellow Enzyme
  source 1..1200: mol_type = other DNA
atgtctttcgttaaggacttcaagccgcaagcgctgcgcgacaccaacctgttcgaacctattaaaattgggaacacacagctggctcatcgcgttgtaatgcctccgctgacccgcatgcgcgctacccatccgggcaacattccgaacaaggagtgggctgcggtttactacggccagcgtgcacagcgtccggggacaatgattatcacggaggcgacgttcatcagcccgcaggcaggtgggtacgataacaagcctggtgtttggtcagacgaacaggttgccgaatggaagaacatcttcctggctattcatgactgtcagtcatttgcgtgggtgcaactgcaggtcctgggctgggccgcctttccggataccctggcgcgtgatgggttacgttacgattctgcctccgataatgtgtatatgaatgcggaacaggaggaaaaagcgaaaaaagctaacaatccgcaacatagcattactaaagacgaaattaaacaatatgtcaaagaatatgttcaggcagctaagaactcgatcgctgcgggtgcggacggcgtggaaattcactcagccaacggttatctgttaaatcagttcctggatccgcacagcaacaaccgcaccgatgagtatgggggctcaattgaaaatcgtgcacgttttactctggaagtcgttgacgcggtggttgatgccatcggcccagaaaaagtgggtttacgtctgagtccgtacggcacgttcaactctatgtcgggcggcgcggaaacgtgtattgttgctcagtatgcctatgtcctgggtgagctggagcgtcgcgccaaggcggggaaacgcctggcgtttgttcatttagtcgaaccacgcgtgacagacccttctctggttgagggggagggcgaataccctgagggcactaacgattttgcttattccatttggaaaggtccgattatccgtgccggcaactatgcactacatcctgaagtagtgcgcgaacaagttaaggaccctcgcaccctgatcggctacggccgcttctttatttcaaatccagacctggtttaccgcttagaagaaggtctgccactgaacaagtatgaccgttctacgttctacaccatgagcgcggagggttacatcgactacccgacctacgaagaagccgtagatctgggctggaacaaaaac

SEQ ID NO: 212 - protein, 400 aa, synthetic construct
  REGION 1..400: note = Variant of ERED chimera of Old Yellow Enzyme
MSFVKDFKPQALRDTNLFEPIKIGNTQLAHRVVMPPLTRMRATHPGNIPNKEWAAVYYGQRAQRPGTMIITEATFISPQAGGYDNKPGVWSDEQVAEWKNIFLAIHDCQSFAWVQLQVLGWAAFPDTLARDGLRYDSASDNVYMNAEQEEKAKKANNPQHSITKDEIKQYVKEYVQAAKNSIAAGADGVEIHSANGYLLNQFLDPHSNNRTDEYGGSIENRARFTLEVVDAVVDAIGPEKVGLRLSPYGTFNSMSGGAETCIVAQYAYVLGELERRAKAGKRLAFVHLVEPRVTDPSLVEGEGEYPEGTNDFAYSIWKGPIIRAGNYALHPEVVREQVKDPRTLIGYGRFFISNPDLVYRLEEGLPLNKYDRSTFYTMSAEGYIDYPTYEEAVDLGWNKN

SEQ ID NO: 213 - DNA, 1200 bp, synthetic construct
  misc_feature 1..1200: note = Variant of ERED chimera of Old Yellow Enzyme
  source 1..1200: mol_type = other DNA
atgtctttcgttaaggacttcaagccgcaagcactgcgcgacaccaacctgttcgaacctattaaaattgggaacacacagctggctcatcgcgttgtaatgcctccgctgacccgcatgcgcgctacccatccgggcaacattccgaacaaggagtgggctgcggtttactacggccagcgtgcacagcgtccggggacaatgattatcacggaggcgacgttcatcagcccgcaggcaggtgggtacgataacaagcctggtgtttggtcagacgaacaggttgccgaatggaagaacatcttcctggctattcatgactgtcagtcatttgcgtgggtgcaactgcaggtcctgggctgggccgcctttccggataccctggcgcgtgatgggttacgttacgattctgcctccgataatgtgtatatgaatgcggaacaggaggaaaaagcgaaaaaagctaacaatccgcaacatgcgattactaaagacgaaattaaacaatatgtcaaagaatatgttcaggcagctaagaactcgatcgctgcgggtgcggacggcgtggaaattcactcagccaacggttatctgttaaatcagttcctggatccgcacagcaacaaccgcaccgatgagtatgggggctcaattgaaaatcgtgcacgttttactctggaagtcgttgacgcggtggttgatgccatcggcccagaaaaagtgggtttacgtctgagtccgtacggcacgttcaactctatgtcgggcggcgcggaaacgtgtattgttgctcagtatgcctatgtcctgggtgagctggagcgtcgcgccaaggcggggaaacgcctggcgtttgttcatttagtcgaaccacgcgtgacagacccttctctggttgagggggagggcgaatactcagagggcactaacgattttgcttattccatttggaaaggtccgattatccgtgccggcaactatgcactacatcctgaagtagtgcgcgaacaagttaaggaccctcgcaccctgatcggctacggccgcttctttatttcaaatccagacctggtttaccgcttagaagaaggtctgccactgaacaagtatgaccgttctacgttctacaccatgagcgcggagggttacatcgactacccgacctacgaagaagccgtagatctgggctggaacaaaaac

SEQ ID NO: 214 - protein, 400 aa, synthetic construct
  REGION 1..400: note = Variant of ERED chimera of Old Yellow Enzyme
MSFVKDFKPQALRDTNLFEPIKIGNTQLAHRVVMPPLTRMRATHPGNIPNKEWAAVYYGQRAQRPGTMIITEATFISPQAGGYDNKPGVWSDEQVAEWKNIFLAIHDCQSFAWVQLQVLGWAAFPDTLARDGLRYDSASDNVYMNAEQEEKAKKANNPQHAITKDEIKQYVKEYVQAAKNSIAAGADGVEIHSANGYLLNQFLDPHSNNRTDEYGGSIENRARFTLEVVDAVVDAIGPEKVGLRLSPYGTFNSMSGGAETCIVAQYAYVLGELERRAKAGKRLAFVHLVEPRVTDPSLVEGEGEYSEGTNDFAYSIWKGPIIRAGNYALHPEVVREQVKDPRTLIGYGRFFISNPDLVYRLEEGLPLNKYDRSTFYTMSAEGYIDYPTYEEAVDLGWNKN

SEQ ID NO: 215 - DNA, 1200 bp, synthetic construct
  misc_feature 1..1200: note = Variant of ERED chimera of Old Yellow Enzyme
  source 1..1200: mol_type = other DNA
atgtctttcgttaaggacttcaagccgcaagcactgcgcgacaccaacctgttcgaacctattaaaattgggaacacacagctggctcatcgcgttgtaatgcctccgctgacccgcatgcgcgctacccatccgggcaacattccgaacaaggagtgggctgcggtttactacggccagcgtgcacagcgtccggggacaatgattatcacggaggcgacgttcatcagcccgcaggcaggtgggtacgataacaagcctggtgtttggtcagacgaacaggttgccgaatggaagaacatcttcctggctattcatgactgtcagtcatttgcgtgggtgcaactgcaggtcctgggctgggccgcctttccggataccctggcgcgtgatgggttacgttacgattctgcctccgataatgtgtatatgaatgcggaacaggaggaaaaagcgaaaaaagctaacaatccgcaacatagcattactaaagacgaaattaaacaatatgtcaaagaatatgttcaggcagctaagaactcgatcgctgcgggtgcggacggcgtggaaattcactcagccaacggttatctgttaaatcagttcctggatccgcacagcaacaaccgcaccgatgagtatgggggctcaattgaaaatcgtgcacgttttactctggaagtcgttgacgcggtggttgatgccatcggcccagaaaaagtgggtttacgtctgagtccgtacggcacgttcaactctatgtcgggcggcgcggaaacgtgtattgttgctcagtatgcctatgtcctgggtgagctggagcgtcgcgccaaggcggggaaacgcctggcgtttgttcatttagtcgaaccacgcgtgacagacccttctctggttgagggggagggcgaatactcagggggcactaacgattttgcttattccatttggaaaggtccgattatccgtgccggcaactatgcactacatcctgaagtagtgcgcgaacaagttaaggaccctcgcaccctgatcggctacggccgcttctttatttcaaatccagacctggtttaccgcttagaagaaggtctgccactgaacaagtatgaccgttctacgttctacaccatgagcgcggagggttacatcgactacccgacctacgaagaagccgtagatctgggctggaacaaaaac

SEQ ID NO: 216 - protein, 400 aa, synthetic construct
  REGION 1..400: note = Variant of ERED chimera of Old Yellow Enzyme
MSFVKDFKPQALRDTNLFEPIKIGNTQLAHRVVMPPLTRMRATHPGNIPNKEWAAVYYGQRAQRPGTMIITEATFISPQAGGYDNKPGVWSDEQVAEWKNIFLAIHDCQSFAWVQLQVLGWAAFPDTLARDGLRYDSASDNVYMNAEQEEKAKKANNPQHSITKDEIKQYVKEYVQAAKNSIAAGADGVEIHSANGYLLNQFLDPHSNNRTDEYGGSIENRARFTLEVVDAVVDAIGPEKVGLRLSPYGTFNSMSGGAETCIVAQYAYVLGELERRAKAGKRLAFVHLVEPRVTDPSLVEGEGEYSGGTNDFAYSIWKGPIIRAGNYALHPEVVREQVKDPRTLIGYGRFFISNPDLVYRLEEGLPLNKYDRSTFYTMSAEGYIDYPTYEEAVDLGWNKN

SEQ ID NO: 217 - DNA, 1200 bp, synthetic construct
  misc_feature 1..1200: note = Variant of ERED chimera of Old Yellow Enzyme
  source 1..1200: mol_type = other DNA
atgtctttcgttaaggacttcaagccgcaagcactgcgcgacaccaacctgttcgaacctattaaaattgggaacacacagctggctcatcgcgttgtaatgcctccgctgacccgcatgcgcgctacccatccgggcaacattccgaacaaggagtgggctgcggtttactacggccagcgtgcacagcgtccggggacaatgattatcacggaggcgacgttcatcagcccgcaggcaggtgggtacgataacaagcctggtgtttggtcagacgaacaggttgccgaatggaagaacatcttcctggctattcatgactgtggttcatttgcgtgggtgcaactgcaggtcctgggctgggccgcctttccggataccctggcgcgtgatgggttacgttacgattctgcctccgataatgtgtatatgaatgcggaacaggaggaaaaagcgaaaaaagctaacaatccgcaacatagcattactaaagacgaaattaaacaatatgtcaaagaatatgttcaggcagctaagaactcgatcgctgcgggtgcggacggcgtggaaattcactcagccaacggttatctgttaaatcagttcctggatccgcacagcaacaaccgcaccgatgagtatgggggctcaattgaaaatcgtgcacgttttactctggaagtcgttgacgcggtggttgatgccatcggcccagaaaaagtgggtttacgtctgagtccgtacggcacgttcaactctatgtcgggcggcgcggaaacgtgtattgttgctcagtatgcctatgtcctgggtgagctggagcgtcgcgccaaggcggggaaacgcctggcgtttgttcatttagtcgaaccacgcgtgacagacccttctctggttgagggggagggcgaatactcagagggcactaacgattttgcttattccatttggaaaggtccgattatccgtgccggcaactatgcactacatcctgaagtagtgcgcgaacaagttaaggaccctcgcaccctgatcggctacggccgcttctttatttcaaatccagacctggtttaccgcttagaagaaggtctgccactgaacaagtatgaccgttctacgttctacaccatgagcgcggagggttacatcgactacccgacctacgaagaagccgtagatctgggctggaacaaaaac

SEQ ID NO: 218 - protein, 400 aa, synthetic construct
  REGION 1..400: note = Variant of ERED chimera of Old Yellow Enzyme
MSFVKDFKPQALRDTNLFEPIKIGNTQLAHRVVMPPLTRMRATHPGNIPNKEWAAVYYGQRAQRPGTMIITEATFISPQAGGYDNKPGVWSDEQVAEWKNIFLAIHDCGSFAWVQLQVLGWAAFPDTLARDGLRYDSASDNVYMNAEQEEKAKKANNPQHSITKDEIKQYVKEYVQAAKNSIAAGADGVEIHSANGYLLNQFLDPHSNNRTDEYGGSIENRARFTLEVVDAVVDAIGPEKVGLRLSPYGTFNSMSGGAETCIVAQYAYVLGELERRAKAGKRLAFVHLVEPRVTDPSLVEGEGEYSEGTNDFAYSIWKGPIIRAGNYALHPEVVREQVKDPRTLIGYGRFFISNPDLVYRLEEGLPLNKYDRSTFYTMSAEGYIDYPTYEEAVDLGWNKN

SEQ ID NO: 219 - DNA, 1200 bp, synthetic construct
  misc_feature 1..1200: note = Variant of ERED chimera of Old Yellow Enzyme
  source 1..1200: mol_type = other DNA
atgtctttcgttaaggacttcaagccgcaagcactgcgcgacaccaacctgttcgaacctattaaaattgggaacacacagctggctcatcgcgttgtaatgcctccgctgacccgcatgcgcgctacccatccgggcaacattccgaacaaggagtgggctgcggtttactacggccagcgtgcacagcgtccggggacaatgattatcacggaggcgacgttcatcagcccgcaggcaggtgggtacgataacaagcctggtgtttggtcagacgaacaggttgccgaatggaagaacatcttcctggctattcatgactgtcagtcatttgcgtgggtgcaactgcaggtcctgggctgggccgcctttccggataccctggcgcgtgatgggttacgttacgattctgcctccgataatgtgtatatgaatgcggaacaggaggaaaaagcgaaaaaagctaacaatccgcaacatagcattactaaagacgaaattaaacaatatgtcaaagaatatgttcaggcagctaagaactcgatcgctgcgggtgcggacggcgtggaaattcactcagccaacggttatctgttaaatcagttcctggatccgcacagcaacaaccgcaccgatgagtatgggggctcaattgaaaatcgtgcacgttttactctggaagtcgttgacgcggtggttgatgccatcggcccagaaaaagtgggtttacgtctgagtccgtacggcacgttcaactctatgtcgggcggcgcggaaacgtgtattgttgctcagtatgcctatgtcctgggtgagctggagcgtcgcgccaaggcggggaaacgcctggcgtttgttcatttagtcgaaccacgcgtgacagacccttctctggttgagggggagggcgaatactcagagggcactaacgattttgcttattccatttggaaaggtccgattatccgtgccggcaactatgcactacatcctgaagtagtgcgcgaacaagttaaggaccctcgcaccctgatcggctacggccgcttctttatttcaaatccagacctggttacgcgcttagaagaaggtctgccactgaacaagtatgaccgttctacgttctacaccatgagcgcggagggttacatcgactacccgacctacgaagaagccgtagatctgggctggaacaaaaac

SEQ ID NO: 220 - protein, 400 aa, synthetic construct
  REGION 1..400: note = Variant of ERED chimera of Old Yellow Enzyme
MSFVKDFKPQALRDTNLFEPIKIGNTQLAHRVVMPPLTRMRATHPGNIPNKEWAAVYYGQRAQRPGTMIITEATFISPQAGGYDNKPGVWSDEQVAEWKNIFLAIHDCQSFAWVQLQVLGWAAFPDTLARDGLRYDSASDNVYMNAEQEEKAKKANNPQHSITKDEIKQYVKEYVQAAKNSIAAGADGVEIHSANGYLLNQFLDPHSNNRTDEYGGSIENRARFTLEVVDAVVDAIGPEKVGLRLSPYGTFNSMSGGAETCIVAQYAYVLGELERRAKAGKRLAFVHLVEPRVTDPSLVEGEGEYSEGTNDFAYSIWKGPIIRAGNYALHPEVVREQVKDPRTLIGYGRFFISNPDLVTRLEEGLPLNKYDRSTFYTMSAEGYIDYPTYEEAVDLGWNKN

SEQ ID NO: 221 - DNA, 1200 bp, synthetic construct
  misc_feature 1..1200: note = Variant of ERED chimera of Old Yellow Enzyme
  source 1..1200: mol_type = other DNA
atgtctttcgttaaggacttcaagccgcaagcactgcgcgacaccaacctgttcgaacctattaaaattgggaacacacagctggctcatcgcgttgtaatgcctccgctgacccgcatgcgcgctacccatccgggcaacattccgaacaaggagtgggctgcggtttactacggccagcgtgcacagcgtccggggacaatgattatcacggaggcgacgttcatcagcccgcaggcaggtgggtacgataacaagcctggtgtttggtcagacgaacaggttgccgaatggaaggagatcttcctggctattcatgactgtcagtcatttgcgtgggtgcaactgcaggtcctgggctgggccgcctttccggataccctggcgcgtgatgggttacgttacgattctgcctccgataatgtgtatatgaatgcggaacaggaggaaaaagcgaaaaaagctaacaatccgcaacatagcattactaaagacgaaattaaacaatatgtcaaagaatatgttcaggcagctaagaactcgatcgctgcgggtgcggacggcgtggaaattcactcagccaacggttatctgttaaatcagttcctggatccgcacagcaacaaccgcaccgatgagtatgggggctcaattgaaaatcgtgcacgttttactctggaagtcgttgacgcggtggttgatgccatcggcccagaaaaagtgggtttacgtctgagtccgtacggcacgttcaactctatgtcgggcggcgcggaaacgtgtattgttgctcagtatgcctatgtcctgggtgagctggagcgtcgcgccaaggcggggaaacgcctggcgtttgttcatttagtcgaaccacgcgtgacagacccttctctggttgagggggagggcgaatactcagagggcactaacgattttgcttattccatttggaaaggtccgattatccgtgccggcaactatgcactacatcctgaagtagtgcgcgaacaagttaaggaccctcgcaccctgatcggctacggccgcttctttatttcaaatccagacctggtttaccgcttagaagaaggtctgccactgaacaagtatgaccgttctacgttctacaccatgagcgcggagggttacatcgactacccgacctacgaagaagccgtagatctgggctggaacaaaaac

SEQ ID NO: 222 - protein, 400 aa, synthetic construct
  REGION 1..400: note = Variant of ERED chimera of Old Yellow Enzyme
MSFVKDFKPQALRDTNLFEPIKIGNTQLAHRVVMPPLTRMRATHPGNIPNKEWAAVYYGQRAQRPGTMIITEATFISPQAGGYDNKPGVWSDEQVAEWKEIFLAIHDCQSFAWVQLQVLGWAAFPDTLARDGLRYDSASDNVYMNAEQEEKAKKANNPQHSITKDEIKQYVKEYVQAAKNSIAAGADGVEIHSANGYLLNQFLDPHSNNRTDEYGGSIENRARFTLEVVDAVVDAIGPEKVGLRLSPYGTFNSMSGGAETCIVAQYAYVLGELERRAKAGKRLAFVHLVEPRVTDPSLVEGEGEYSEGTNDFAYSIWKGPIIRAGNYALHPEVVREQVKDPRTLIGYGRFFISNPDLVYRLEEGLPLNKYDRSTFYTMSAEGYIDYPTYEEAVDLGWNKN

SEQ ID NO: 223 - DNA, 1200 bp, synthetic construct
  misc_feature 1..1200: note = Variant of ERED chimera of Old Yellow Enzyme
  source 1..1200: mol_type = other DNA
atgtctttcgttaaggacttcaagccgcaagcactgcgcgacaccaacctgttcgaacctattaaaattgggaacacacagctggctcatcgcgttgtaatgcctccgctgacccgcatgcgcgctacccatccgggcaacattccgaacaaggagtgggctgcggtttactacggccagcgtgcacagcgtccggggacaatgattatcacggaggcgacgttcatcagcccgcaggcaggtgggtacgataacaagcctggtgtttggtcagacgaacaggttgccgaatggaagaacatcttcctggctattcatgactgtcagtcatttgcgtgggtgcaactgcaggtcctgggctgggccgcctttccggataccctggcgcgtgatgggttacgttacgattctgcctccgataatgtgtatatgaatgcggaacaggaggaaaaagcgaaaaaagctaacaatccgcaacatagcattactaaagacgaaattaaacaatatgtcaaagaatatgttcaggcagctaagaactcgatcgctgcgggtgcggacggcgtggaaattcactcagccaacggttatctgttaaatcagttcctggatccgcacagcaacaaccgcaccgatgagtatgggggctcaattgaaaatcgtgcacgttttactctggaagtcgttgacgcggtggttgatgccatcggcccagaaaaagtgggtttacgtctgagtccgtacggcacgttcaactctatgtcgggcggcgcggaaacgtgtattgttgctcagtatgcctatgtcctgggtgagctggagcgtcgcgccaaggcggggaaacgcctggcgtttgttcatttagtcgaaccacgcgtgacagacccttctctggttgagggggagggcgaatactcagagggcactaacgattttgcttattccatttggaaaggtccgattatccgtgccggcaactatgcactacatcctgaagtagtgcgcggtcaagttaaggaccctcgcaccctgatcggctacggccgcttctttatttcaaatccagacctggtttaccgcttagaagaaggtctgccactgaacaagtatgaccgttctacgttctacaccatgagcgcggagggttacatcgactacccgacctacgaagaagccgtagatctgggctggaacaaaaac

SEQ ID NO: 224 - protein, 400 aa, synthetic construct
  REGION 1..400: note = Variant of ERED chimera of Old Yellow Enzyme
MSFVKDFKPQALRDTNLFEPIKIGNTQLAHRVVMPPLTRMRATHPGNIPNKEWAAVYYGQRAQRPGTMIITEATFISPQAGGYDNKPGVWSDEQVAEWKNIFLAIHDCQSFAWVQLQVLGWAAFPDTLARDGLRYDSASDNVYMNAEQEEKAKKANNPQHSITKDEIKQYVKEYVQAAKNSIAAGADGVEIHSANGYLLNQFLDPHSNNRTDEYGGSIENRARFTLEVVDAVVDAIGPEKVGLRLSPYGTFNSMSGGAETCIVAQYAYVLGELERRAKAGKRLAFVHLVEPRVTDPSLVEGEGEYSEGTNDFAYSIWKGPIIRAGNYALHPEVVRGQVKDPRTLIGYGRFFISNPDLVYRLEEGLPLNKYDRSTFYTMSAEGYIDYPTYEEAVDLGWNKN

SEQ ID NO: 225 - DNA, 1200 bp, synthetic construct
  misc_feature 1..1200: note = Variant of ERED chimera of Old Yellow Enzyme
  source 1..1200: mol_type = other DNA
atgtctttcgttaaggacttcaagccgcaagcactgcgcgacaccaacctgttcgaacctattaaaattgggaacacacagctggctcatcgcgttgtaatgcctccgctgacccgcatgcgcgctacccatccgggcaacattccgaacaaggagtgggctgcggtttactacggccagcgtgcacagcgtccggggacaatgattatcacggaggcgacgttcatcagcccgcaggcaggtgggtacgataacaagcctggtgtttggtcagacgaacaggttgccgaatggaagaacatcttcctggctattcatgactgtcagtcatttgcgtgggtgcaactgcaggtcctgggctgggccgcctttccggataccctggcgcgtgatgggttacgttacgattctgcctccgataatgtgtatatgaatgcggaacaggaggaaaaagcgaaaaaagctaacaatccgcaacatagcattactaaagacgaaattaaacaatatgtcaaagaatatgttcaggcagctaagaactcgatcgctgcgggtgcggacggcgtggaaattcactcagccaacggttatctgttaaatcagttcctggatccgcacagcaacaaccgcaccgatgagtatgggggctcaattgaaaatcgtgcacgttttactctggaagtcgttgacgcggtggttgatgccatcggcccagaaaaagtgggtttacgtctgagtccgtacggcacgttcaactctatgtcgggcggcgcggaaacgtgtattgttgctcagtatgcctatgtcctgggtgagctggagcgtcgcgccaaggcggggaaacgcctggcgtttgttcatttagtcgaaccacgcgtgacagacccttctctggttgagggggagggcgaatactcagagggcactaacgattttgcttattccatttggaaaggtccgattatccgtgccggcaactatgcactacatcctgaaactgtgcgcgaacaagttaaggaccctcgcaccctgatcggctacggccgcttctttatttcaaatccagacctggtttaccgcttagaagaaggtctgccactgaacaagtatgaccgttctacgttctacaccatgagcgcggagggttacatcgactacccgacctacgaagaagccgtagatctgggctggaacaaaaac

SEQ ID NO: 226 - protein, 400 aa, synthetic construct
  REGION 1..400: note = Variant of ERED chimera of Old Yellow Enzyme
MSFVKDFKPQALRDTNLFEPIKIGNTQLAHRVVMPPLTRMRATHPGNIPNKEWAAVYYGQRAQRPGTMIITEATFISPQAGGYDNKPGVWSDEQVAEWKNIFLAIHDCQSFAWVQLQVLGWAAFPDTLARDGLRYDSASDNVYMNAEQEEKAKKANNPQHSITKDEIKQYVKEYVQAAKNSIAAGADGVEIHSANGYLLNQFLDPHSNNRTDEYGGSIENRARFTLEVVDAVVDAIGPEKVGLRLSPYGTFNSMSGGAETCIVAQYAYVLGELERRAKAGKRLAFVHLVEPRVTDPSLVEGEGEYSEGTNDFAYSIWKGPIIRAGNYALHPETVREQVKDPRTLIGYGRFFISNPDLVYRLEEGLPLNKYDRSTFYTMSAEGYIDYPTYEEAVDLGWNKN

SEQ ID NO: 227 - DNA, 1200 bp, synthetic construct
  misc_feature 1..1200: note = Variant of ERED chimera of Old Yellow Enzyme
  source 1..1200: mol_type = other DNA
atgtctttcgttaaggacttcaagccgcaagcactgcgcgacaccaacctgttcgaacctattaaaattgggaacacacagctggctcatcgcgttgtaatgcctccgctgacccgcatgcgcgctacccatccgggcaacattccgaacaaggagtgggctgcggtttactacggccagcgtgcacagcgtccggggacaatgattatcacggaggcgacgttcatcagcccgcaggcaggtgggtacgataacaagcctggtgtttggtcagacgaacaggttgccgaatggaagaacatcttcctggctattcatgactgtcagtcatttgcgtgggtgcaactgcaggtcctgggctgggccgcctttccggataccctggcgcgtgatgggttacgttacgattctgcctccgataatgtgtatatgaatgcggaacaggaggaaaaagcgaaaaaagctaacaatccgcaacatagcattactaaagacgaaattaaacaatatgtcaaagaatatgttcaggcagctaagaactcgatcgctgcgggtgcggacggcgtggaaattcactcagccaacggttatctgttaaatcagttcctggatccgcacagcaaccggcgcaccgatgagtatgggggctcaattgaaaatcgtgcacgttttactctggaagtcgttgacgcggtggttgatgccatcggcccagaaaaagtgggtttacgtctgagtccgtacggcacgttcaactctatgtcgggcggcgcggaaacgtgtattgttgctcagtatgcctatgtcctgggtgagctggagcgtcgcgccaaggcggggaaacgcctggcgtttgttcatttagtcgaaccacgcgtgacagacccttctctggttgagggggagggcgaatactcagagggcactaacgattttgcttattccatttggaaaggtccgattatccgtgccggcaactatgcactacatcctgaagtagtgcgcgaacaagttaaggaccctcgcaccctgatcggctacggccgcttctttatttcaaatccagacctggtttaccgcttagaagaaggtctgccactgaacaagtatgaccgttctacgttctacaccgagagcgcggagggttacatcgactacccgacctacgaagaagccgtagatctgggctggaacaaaaac

SEQ ID NO: 228 - protein, 400 aa, synthetic construct
  REGION 1..400: note = Variant of ERED chimera of Old Yellow Enzyme
MSFVKDFKPQALRDTNLFEPIKIGNTQLAHRVVMPPLTRMRATHPGNIPNKEWAAVYYGQRAQRPGTMIITEATFISPQAGGYDNKPGVWSDEQVAEWKNIFLAIHDCQSFAWVQLQVLGWAAFPDTLARDGLRYDSASDNVYMNAEQEEKAKKANNPQHSITKDEIKQYVKEYVQAAKNSIAAGADGVEIHSANGYLLNQFLDPHSNRRTDEYGGSIENRARFTLEVVDAVVDAIGPEKVGLRLSPYGTFNSMSGGAETCIVAQYAYVLGELERRAKAGKRLAFVHLVEPRVTDPSLVEGEGEYSEGTNDFAYSIWKGPIIRAGNYALHPEVVREQVKDPRTLIGYGRFFISNPDLVYRLEEGLPLNKYDRSTFYTESAEGYIDYPTYEEAVDLGWNKN

SEQ ID NO: 229 - DNA, 1200 bp, synthetic construct
  misc_feature 1..1200: note = Variant of ERED chimera of Old Yellow Enzyme
  source 1..1200: mol_type = other DNA
atgtctttcgttaaggacttcaagccgcaagcactgcgcgacaccaacctgttcgaacctattaaaattgggaacacacagctggctcatcgcgttgtaatgcctccgctgacccgcatgcgcgctacccatccgggcaacattccgaacaaggagtgggctgcggtttactacggccagcgtgcacagcgtccggggacaatgattatcacggaggcgacgttcatcagcccgcaggcaggtgggtacgataacaagcctggtgtttggtcagacgaacagattgccgaatggaagaacatcttcctggctattcatgactgtcagtcatttgcgtgggtgcaactgcaggtcctgggctgggccgcctttccggataccctggcgcgtgatgggttacgttacgattctgcctccgataatgtgtatatgaatgcggaacaggaggaaaaagcgaaaaaagctaacaatccgcaacatagcattactaaagacgaaattaaacaatatgtcaaagaatatgttcaggcagctaagaactcgatcgctgcgggtgcggacggcgtggaaattcactcagccaacggttatctgttaaatcagttcctggatccgcacagcaacaaccgcaccgatgagtatgggggctcaattgaaaatcgtgcacgttttactctggaagtcgttgacgcggtggttgatgccatcggcccagaaaaagtgggtttacgtctgagtccgtacggcacgttcaactctatgtcgggcggcgcggaaacgtgtattgttgctcagtatgcctatgtcctgggtgagctggagcgtcgcgccaaggcggggaaacgcctggcgtttgttcatttagtcgaaccacgcgtgacagacccttctctggttgagggggagggcgaatactcagagggcactaacgattttgcttattccatttggaaaggtccgattatccgtgccggcaactatgcactacatcctgaagtagtgcgcgaacaagttaaggaccctcgcaccctgatcggctacggccgcttctttatttcaaatccagacctggtttaccgcttagaagaaggtctgccactgaacaagtatgaccgttctacgttctacaccatgagcgcggagggttacatcgactacccgacctacgaagaagccgtagatctgggctggaacaaaaac

SEQ ID NO: 230 - protein, 400 aa, synthetic construct
  REGION 1..400: note = Variant of ERED chimera of Old Yellow Enzyme
MSFVKDFKPQALRDTNLFEPIKIGNTQLAHRVVMPPLTRMRATHPGNIPNKEWAAVYYGQRAQRPGTMIITEATFISPQAGGYDNKPGVWSDEQIAEWKNIFLAIHDCQSFAWVQLQVLGWAAFPDTLARDGLRYDSASDNVYMNAEQEEKAKKANNPQHSITKDEIKQYVKEYVQAAKNSIAAGADGVEIHSANGYLLNQFLDPHSNNRTDEYGGSIENRARFTLEVVDAVVDAIGPEKVGLRLSPYGTFNSMSGGAETCIVAQYAYVLGELERRAKAGKRLAFVHLVEPRVTDPSLVEGEGEYSEGTNDFAYSIWKGPIIRAGNYALHPEVVREQVKDPRTLIGYGRFFISNPDLVYRLEEGLPLNKYDRSTFYTMSAEGYIDYPTYEEAVDLGWNKN

SEQ ID NO: 231 - DNA, 1200 bp, synthetic construct
  misc_feature 1..1200: note = Variant of ERED chimera of Old Yellow Enzyme
  source 1..1200: mol_type = other DNA
atgtctttcgttaaggacgggaagccgcaagcactgcgcgacaccaacctgttcgaacctattaaaattgggaacacacagctggctcatcgcgttgtaatgcctccgctgacccgcatgcgcgctacccatccgggcaacattccgaacaaggagtgggctgcggtttactacggccagcgtgcacagcgtccggggacaatgattatcacggaggcgacgttcatcagcccgcaggcaggtgggtacgataacaagcctggtgtttggtcagacgaacaggttgccgaatggaagaacatcttcctggctattcatgactgtcagtcatttgcgtgggtgcaactgcaggtcctgggctgggccgcctttccggataccctggcgcgtgatgggttacgttacgattctgcctccgataatgtgtatatgaatgcggaacaggaggaaaaagcgaaaaaagctaacaatccgcaacatagcattactaaagacgaaattaaacaatatgtcaaagaatatgttcaggcagctaagaactcgatcgctgcgggtgcggacggcgtggaaattcactcagccaacggttatctgttaaatcagttcctggatccgcacagcaacaaccgcaccgatgagtatgggggctcaattgaaaatcgtgcacgttttactctggaagtcgttgacgcggtggttgatgccatcggcccagaaaaagtgggtttacgtctgagtccgtacggcacgttcaactctatgtcgggcggcgcggaaacgtgtattgttgctcagtatgcctatgtcctgggtgagctggagcgtcgcgccaaggcggggaaacgcctggcgtttgttcatttagtcgaaccacgcgtgacagacccttctctggttgagggggagggcgaatactcaggtggcactaacgattttgcttattccatttggaaaggtccgattatccgtgccggcaactatgcactacatcctgaagtagtgcgcgaacaagttaaggaccctcgcaccctgatcggctacggccgcttctttatttcaaatccagacctggtttaccgcttagaagaaggtctgccactgaacaagtatgaccgttctacgttctacaccatgagcgcggagggttacatcgactacccgacctacgaagaagccgtagatctgggctggaacaaaaac

SEQ ID NO: 232 - protein, 400 aa, synthetic construct
  REGION 1..400: note = Variant of ERED chimera of Old Yellow Enzyme
MSFVKDGKPQALRDTNLFEPIKIGNTQLAHRVVMPPLTRMRATHPGNIPNKEWAAVYYGQRAQRPGTMIITEATFISPQAGGYDNKPGVWSDEQVAEWKNIFLAIHDCQSFAWVQLQVLGWAAFPDTLARDGLRYDSASDNVYMNAEQEEKAKKANNPQHSITKDEIKQYVKEYVQAAKNSIAAGADGVEIHSANGYLLNQFLDPHSNNRTDEYGGSIENRARFTLEVVDAVVDAIGPEKVGLRLSPYGTFNSMSGGAETCIVAQYAYVLGELERRAKAGKRLAFVHLVEPRVTDPSLVEGEGEYSGGTNDFAYSIWKGPIIRAGNYALHPEVVREQVKDPRTLIGYGRFFISNPDLVYRLEEGLPLNKYDRSTFYTMSAEGYIDYPTYEEAVDLGWNKN

SEQ ID NO: 233 - DNA, 1200 bp, synthetic construct
  misc_feature 1..1200: note = Variant of ERED chimera of Old Yellow Enzyme
  source 1..1200: mol_type = other DNA
atgtctttcgttaaggacttcaagccgcaagcactgcgcgacaccaacctgttcgaacctattaaaattgggaacacacagctggctcatcgcgttgtaatgcctccgctgacccgcatgcgcgctacccatccgggcaacattccgaacaaggagtgggctgcggtttactacggccagcgtgcacagcgtccggggacaatgattatcacggaggcgacgttcatcagcccgcaggcaggtgggtacgataacaagcctggtgtttggtcagacgaacaggttgccgaatggaagaacatcttcctggctattcatgactgtcagtcatttgcgtgggtgcaactgcaggtcctgggctgggccgcctttccggataccctggcgcgtgatgggttacgttacgattctgcctccgataatgtgtatatgaatgcggaacaggaggaaaaagcgaaaaaagctaacaatccgcaacatagcattactaaagacgaaattaaacaatatgtcaaagaatatgttcaggcagctaagaactcgatcgctgcgggtgcggacggcgtggaaattcactcagccaacggttatctgttaaatcagttcctggatccgcacagcaacaaccgcaccgatgagtatgggggctcaattgaaaatcgtgcacgttttactctggaagtcgttgacgcggtggttgatgccatcggcccagaaaaagtgggtttacgtctgagtccgtacggcacgttcaactctatgtcgggcggcgcggaaacgtgtattgttgctcagtatgcctatgtcctgggtgagctggagcgtcgcgccaaggcggggaaacgcctggcgtttgttcatttagtcgaaccacgcgtgacagacccttctctggttgagggggagggcgaatactcacagggcactaacgattttgcttattccatttggaaaggtccgattatccgtgccggcaactatgcactacatcctgaagtagtgcgcgaacaagttaaggaccctcgcaccctgatcggctacggccgcttctttatttcaaatccagacctggtttaccgcttagaagaaggtctgccactgaacaagtatgaccgttctacgttctacaccatgagcgcggagggttacatcgactacccgacctacgaagaagccgtagatctgggctggaacaaaaac

SEQ ID NO: 234 - protein, 400 aa, synthetic construct
  REGION 1..400: note = Variant of ERED chimera of Old Yellow Enzyme
MSFVKDFKPQALRDTNLFEPIKIGNTQLAHRVVMPPLTRMRATHPGNIPNKEWAAVYYGQRAQRPGTMIITEATFISPQAGGYDNKPGVWSDEQVAEWKNIFLAIHDCQSFAWVQLQVLGWAAFPDTLARDGLRYDSASDNVYMNAEQEEKAKKANNPQHSITKDEIKQYVKEYVQAAKNSIAAGADGVEIHSANGYLLNQFLDPHSNNRTDEYGGSIENRARFTLEVVDAVVDAIGPEKVGLRLSPYGTFNSMSGGAETCIVAQYAYVLGELERRAKAGKRLAFVHLVEPRVTDPSLVEGEGEYSQGTNDFAYSIWKGPIIRAGNYALHPEVVREQVKDPRTLIGYGRFFISNPDLVYRLEEGLPLNKYDRSTFYTMSAEGYIDYPTYEEAVDLGWNKN

SEQ ID NO: 235 - DNA, 1200 bp, synthetic construct
  misc_feature 1..1200: note = Variant of ERED chimera of Old Yellow Enzyme
  source 1..1200: mol_type = other DNA
atgtctttcgttaaggacttcaagccgcaagcactgcgcgacaccaacctgttcgaacctattaaaattgggaacacacagctggctcatcgcgttgtaatgcctccgctgacccgcatgcgcgctacccatccgggcaacattccgaacaaggagtgggctgcggtttactacggccagcgtgcacagcgtccggggacaatgattatcacggaggcgacgttcatcagcccgcaggcaggtgggtacgataacaagcctggtgtttggtcagacgaacaggttgccgaatggaagaacatcttcctggctattcatgactgtcagtcatttgcgtgggtgcaactgcaggtcctgggctgggccgcctttccggataccctggcgcgtgatgggttacgttacgattctgcctccgataatgtgtatatgaatgcggaacaggaggaaaaagcgaaaaaagctaacaatccgcaacatagcattactaaagacgaaattaaacaatatgtcaaagaatatgttcaggcagctaagaactcgatcgctgcgggtgcggacggcgtggaaattcactcagccaacggttatctgttaaatcagttcctggatccgcacagcaaccggcgcaccgatgagtatgggggctcaattgaaaatcgtgcacgttttactctggaagtcgttgacgcggtggttgatgccatcggcccagaaaaagtgggtttacgtctgagtccgtacggcacgttcaactctatgtcgggcggcgcggaaacgtgtattgttgctcagtatgcctatgtcctgggtgagctggagcgtcgcgccaaggcggggaaacgcctggcgtttgttcatttagtcgaaccacgcgtgacagacccttctctggttgagggggagggcgaatactcagagggcactaacgattttgcttattccatttggaaaggtccgattatccgtgccggcaactatgcactacatcctgaagtagtgcgcgaacaagttaaggaccctcgcaccctgatcggctacggccgcttctttatttcaaatccagacctggtttaccgcttagaagaaggtctgccactgaacaagtatgaccgttctacgttctacaccatgagcgcggagggttacatcgactacccgacctacgaagaagccgtagatctgggctggaacaaaaac

SEQ ID NO: 236 - protein, 400 aa, synthetic construct
  REGION 1..400: note = Variant of ERED chimera of Old Yellow Enzyme
MSFVKDFKPQALRDTNLFEPIKIGNTQLAHRVVMPPLTRMRATHPGNIPNKEWAAVYYGQRAQRPGTMIITEATFISPQAGGYDNKPGVWSDEQVAEWKNIFLAIHDCQSFAWVQLQVLGWAAFPDTLARDGLRYDSASDNVYMNAEQEEKAKKANNPQHSITKDEIKQYVKEYVQAAKNSIAAGADGVEIHSANGYLLNQFLDPHSNRRTDEYGGSIENRARFTLEVVDAVVDAIGPEKVGLRLSPYGTFNSMSGGAETCIVAQYAYVLGELERRAKAGKRLAFVHLVEPRVTDPSLVEGEGEYSEGTNDFAYSIWKGPIIRAGNYALHPEVVREQVKDPRTLIGYGRFFISNPDLVYRLEEGLPLNKYDRSTFYTMSAEGYIDYPTYEEAVDLGWNKN

SEQ ID NO: 237 - DNA, 1200 bp, synthetic construct
  misc_feature 1..1200: note = Variant of ERED chimera of Old Yellow Enzyme
  source 1..1200: mol_type = other DNA
atgtctttcgttaaggacttcaagccgcaagcactgcgcgacaccaacctgttcgaacctattaaaattgggaacacacagctggctcatcgcgttgtaatgcctccgctgacccgcatgcgcgctacccatccgggcaacattccgaacaaggagtgggctgcggtttactacggccagcgtgcacagcgtccggggacaatgattatcacggaggcgacgttcatcagcccgcaggcaggtgggtacgataacaagcctggtgtttggtcagacgaacaggttgccgaatggaagaacatcttcctggctattcatgactgtcagtcatttgcgtgggtgcaactgcaggtcctgggctgggccgcctttccggataccctggcgcgtgatgggttacgttacgattctgcctccgataatgtgtatatgaatgcggaacaggaggaaaaagcgaaaaaagctaacaatccgcaacatagcattactaaagacgaaattaaacaatatgtcaaagaatatgttcaggcagctaagaactcgatcgctgcgggtgcggacggcgtggaaattcactcagccaacggttatctgttaaatcagttcctggatccgcacagcaacaaccgcaccgatgagtatgggggctcaattgaaaatcgtgcacgttttactctggaagtcgttgacgcggtggttgatgccatcggcccagaaaaagtgggtttacgtctgagtccgtacggcacgttcaactctatgtcgggcggcgcggaaacgtgtattgttgctcagtatgcctatgtcctgggtgagctggagcgtcgcgccaaggcggggaaacgcctggcgtttgttcatttagtcgaaccacgcgtgacagacccttatctggttgagggggagggcgaatactcagagggcactaacgattttgcttattccatttggaaaggtccgattatccgtgccggcaactatgcactacatcctgaagtagtgcgcgaacaagttaaggaccctcgcaccctgatcggctacggccgcttctttatttcaaatccagacctggtttaccgcttagaagaaggtctgccactgaacaagtatgaccgttctacgttctacaccatgagcgcggagggttacatcgactacccgacctacgaagaagccgtagatctgggctggaacaaaaac

SEQ ID NO: 238 - protein, 400 aa, synthetic construct
  REGION 1..400: note = Variant of ERED chimera of Old Yellow Enzyme
MSFVKDFKPQALRDTNLFEPIKIGNTQLAHRVVMPPLTRMRATHPGNIPNKEWAAVYYGQRAQRPGTMIITEATFISPQAGGYDNKPGVWSDEQVAEWKNIFLAIHDCQSFAWVQLQVLGWAAFPDTLARDGLRYDSASDNVYMNAEQEEKAKKANNPQHSITKDEIKQYVKEYVQAAKNSIAAGADGVEIHSANGYLLNQFLDPHSNNRTDEYGGSIENRARFTLEVVDAVVDAIGPEKVGLRLSPYGTFNSMSGGAETCIVAQYAYVLGELERRAKAGKRLAFVHLVEPRVTDPYLVEGEGEYSEGTNDFAYSIWKGPIIRAGNYALHPEVVREQVKDPRTLIGYGRFFISNPDLVYRLEEGLPLNKYDRSTFYTMSAEGYIDYPTYEEAVDLGWNKN

SEQ ID NO: 239 - DNA, 1200 bp, synthetic construct
  misc_feature 1..1200: note = Variant of ERED chimera of Old Yellow Enzyme
  source 1..1200: mol_type = other DNA
atgtctttcgttaaggacttcaagccgcaagcactgcgcgacaccaacctgttcgaacctattaaaattgggaacacacagctggctcatcgcgttgtaatgcctccgctgacccgcatgcgcgctacccatccgggcaacattccgaacaaggagtgggctgcgtattactacggccagcgtgcacagcgtccggggacaatgattatcacggaggcgacgttcatcagcccgcaggcaggtgggtacgataacaagcctggtgtttggtcagacgaacaggttgccgaatggaagaacatcttcctggctattcatgactgtcagtcatttgcgtgggtgcaactgcaggtcctgggctgggccgcctttccggataccctggcgcgtgatgggttacgttacgattctgcctccgataatgtgtatatgaatgcggaacaggaggaaaaagcgaaaaaagctaacaatccgcaacatagcattactaaagacgaaattaaacaatatgtcaaagaatatgttcaggcagctaagaactcgatcgctgcgggtgcggacggcgtggaaattcactcagccaacggttatctgttaaatcagttcctggatccgcacagcaacaaccgcaccgatgagtatgggggctcaattgaaaatcgtgcacgttttactctggaagtcgttgacgcggtggttgatgccatcggcccagaaaaagtgggtttacgtctgagtccgtacggcacgttcaactctatgtcgggcggcgcggaaacgtgtattgttgctcagtatgcctatgtcctgggtgagctggagcgtcgcgccaaggcggggaaacgcctggcgtttgttcatttagtcgaaccacgcgtgacagacccttctctggttgagggggagggcgaatactcagagggcactaacgattttgcttattccatttggaaaggtccgattatccgtgccggcaactatgcactacatcctgaagtagtgcgcgaacaagttaaggaccctcgcaccctgatcggctacggccgcttctttatttcaaatccagacctggtttaccgcttagaagaaggtctgccactgaacaagtatgaccgttctacgttctacacccagagcgcggagggttacatcgactacccgacctacgaagaagccgtagatctgggctggaacaaaaac

SEQ ID NO: 240 - protein, 400 aa, synthetic construct
  REGION 1..400: note = Variant of ERED chimera of Old Yellow Enzyme
MSFVKDFKPQALRDTNLFEPIKIGNTQLAHRVVMPPLTRMRATHPGNIPNKEWAAYYYGQRAQRPGTMIITEATFISPQAGGYDNKPGVWSDEQVAEWKNIFLAIHDCQSFAWVQLQVLGWAAFPDTLARDGLRYDSASDNVYMNAEQEEKAKKANNPQHSITKDEIKQYVKEYVQAAKNSIAAGADGVEIHSANGYLLNQFLDPHSNNRTDEYGGSIENRARFTLEVVDAVVDAIGPEKVGLRLSPYGTFNSMSGGAETCIVAQYAYVLGELERRAKAGKRLAFVHLVEPRVTDPSLVEGEGEYSEGTNDFAYSIWKGPIIRAGNYALHPEVVREQVKDPRTLIGYGRFFISNPDLVYRLEEGLPLNKYDRSTFYTQSAEGYIDYPTYEEAVDLGWNKN

SEQ ID NO: 241 - DNA, 1200 bp, synthetic construct
  misc_feature 1..1200: note = Variant of ERED chimera of Old Yellow Enzyme
  source 1..1200: mol_type = other DNA
atgtctttcgttaaggacttcaagccgcaagcactgcgcgacaccaacctgttcgaacctattaaaattgggaacacacagctggctcatcgcgttgtaatgcctccgctgacccgcatgcgcgctacccatccgggcaacattccgaacaaggagtgggctgcggtttactacggccagcgtgcacagcgtccggggacaatgattatcacggaggcgacgttcatcagcccgcaggcaggtgggtacgataacaagcctggtgtttggtcagacgaacaggttgccgaatggaagaacatcttcctggctattcatgactgtcagtcatttgcgtgggtgcaactgcaggtcctgggctgggccgcctttccggataccctggcgcgtgatgggttacgttacgattctgcctccgataatgtgtatatgaatgcggaacaggaggaaaaagcgaaaaaagctaacaatccgcaacatagcattactaaagacgaaattaaacaatatgtcaaagaatatgttcaggcagctaagaactcgatcgctgcgggtgcggacggcgtggaaattcactcagccaacggttatctgttaaatcagttcctggatccgcacagcaacaaccgcaccgatgagtatgggggctcaattgaaaatcgtgcacgttttactctggaagtcgttgacgcggtggttgatgccatcggcccagaaaaagtgggtttacgtctgagtccgtacggcacgttcaactctatgtcgggcggcgcggaaacgtgtattgttgctcagtatgcctatgtcctgggtgagctggagcgtcgcgccaaggcggggaaacgcctggcgtttgttcatttagtcgaaccacgcgtgacagacccttctctggttgagggggagggcgaatactcagagggcactaacgattttgcttattccatttggaaaggtccgattatccgtgccggcaactatgcactacatcctgaagtagtgcgcgaacaagttaaggaccctcgcaccctgatcggctacggccgcttctttatttcaaatccagacctggtttaccgcttagaagaaggtctgccactgaacaagtatgaccgttctacgttctacaccgggagcgcggagggttacatcgactacccgacctacgaagaagccgtagatctgggctggaacaaaaac

SEQ ID NO: 242 - protein, 400 aa, synthetic construct
  REGION 1..400: note = Variant of ERED chimera of Old Yellow Enzyme
MSFVKDFKPQALRDTNLFEPIKIGNTQLAHRVVMPPLTRMRATHPGNIPNKEWAAVYYGQRAQRPGTMIITEATFISPQAGGYDNKPGVWSDEQVAEWKNIFLAIHDCQSFAWVQLQVLGWAAFPDTLARDGLRYDSASDNVYMNAEQEEKAKKANNPQHSITKDEIKQYVKEYVQAAKNSIAAGADGVEIHSANGYLLNQFLDPHSNNRTDEYGGSIENRARFTLEVVDAVVDAIGPEKVGLRLSPYGTFNSMSGGAETCIVAQYAYVLGELERRAKAGKRLAFVHLVEPRVTDPSLVEGEGEYSEGTNDFAYSIWKGPIIRAGNYALHPEVVREQVKDPRTLIGYGRFFISNPDLVYRLEEGLPLNKYDRSTFYTGSAEGYIDYPTYEEAVDLGWNKN

SEQ ID NO: 243 - DNA, 1200 bp, synthetic construct
  misc_feature 1..1200: note = Variant of ERED chimera of Old Yellow Enzyme
  source 1..1200: mol_type = other DNA
atgtctttcgttaaggacttcaagccgcaagcactgcgcgacaccaacctgttcgaacctattaaaattgggaacacacagctggctcatcgcgttgtaatgcctccgctgacccgcatgcgcgctacccatccgggcaacattccgaacaaggagtgggctgcggtttactacggccagcgtgcacagcgtccggggacaatgattatcacggaggcgacgttcatcagcccgcaggcaggtgggtacgataacaagcctggtgtttggtcagacgaacaggttgccgaatggaagaacatcttcctggctattcatgactgtcagtcatttgcgtgggtgcaactgcaggtcctgggctgggccgcctttccggataccctggcgcgtgatgggttacgttacgattctgcctccgataatgtgtatatgaatgcggaacaggaggaaaaagcgaaaaaagctaacaatccgcaacatagcattactaaagacgaaattaaacaatatgtcaaagaatatgttcaggcagctaagaactcgatcgctgcgggtgcggacggcgtggaaattcactcagccaacggttatctgttaaatcagttcctggatccgcacagcaacaaccgcaccgatgagtatgggggctcaattgaaaatcgtgcacgttttactctggaagtcgttgacgcggtggttgatgccatcggcccagaaaaagtgggtttacgtctgagtccgtacggcacgttcaactctatgtcgggcggcaaggaaacgtgtattgttgctcagtatgcctatgtcctgggtgagctggagcgtcgcgccaaggcggggaaacgcctggcgtttgttcatttagtcgaaccacgcgtgacagacccttctctggttgagggggagggcgaatactcagagggcactaacgattttgcttattccatttggaaaggtccgattatccgtgccggcaactatgcactacatcctgaagtagtgcgcgaacaagttaaggaccctcgcaccctgatcggctacggccgcttctttatttcaaatccagacctggtttaccgcttagaagaaggtctgccactgaacaagtatgaccgttctacgttctacaccatgagcgcggagggttacatcgactacccgacctacgaagaagccgtagatctgggctggaacaaaaac

SEQ ID NO: 244 - protein, 400 aa, synthetic construct
  REGION 1..400: note = Variant of ERED chimera of Old Yellow Enzyme
MSFVKDFKPQALRDTNLFEPIKIGNTQLAHRVVMPPLTRMRATHPGNIPNKEWAAVYYGQRAQRPGTMIITEATFISPQAGGYDNKPGVWSDEQVAEWKNIFLAIHDCQSFAWVQLQVLGWAAFPDTLARDGLRYDSASDNVYMNAEQEEKAKKANNPQHSITKDEIKQYVKEYVQAAKNSIAAGADGVEIHSANGYLLNQFLDPHSNNRTDEYGGSIENRARFTLEVVDAVVDAIGPEKVGLRLSPYGTFNSMSGGKETCIVAQYAYVLGELERRAKAGKRLAFVHLVEPRVTDPSLVEGEGEYSEGTNDFAYSIWKGPIIRAGNYALHPEVVREQVKDPRTLIGYGRFFISNPDLVYRLEEGLPLNKYDRSTFYTMSAEGYIDYPTYEEAVDLGWNKN

SEQ ID NO: 245 - DNA, 1200 bp, synthetic construct
  misc_feature 1..1200: note = Variant of ERED chimera of Old Yellow Enzyme
  source 1..1200: mol_type = other DNA
atgtctttcgttaaggacttcaagccgcaagcactgcgcgacaccaacctgttcgaacctattaaaattgggaacacacagctggctcatcgcgttgtaatgcctccgctgacccgcatgcgcgctacccatccgggcaacattccgaacaaggagtgggctgcggtttactacggccagcgtgcacagcgtccggggacaatgattatcacggaggcgacgttcatcagcccgcaggcaggtgggtacgataacaagcctggtgtttggtcagacgaacaggttgccgaatggaagaacatcttcctggctattcatgactgtcagtcatttgcgtgggtgcaactgcaggtcctgggctgggccgcctttccggataccctggcgcgtgatgggttacgttacgattctgcctccgataatgtgtatatgaatgcggaacaggaggaaaaagcgaaaaaagctaacaatccgcaacatagcattactaaagacgaaattaaacaatatgtcaaagaatatgttcaggcagctaagaactcgatcgctgcgggtgcggacggcgtggaaattcactcagccaacggttatctgttaaatcagttcctggatccgcacagcaacaaccgcaccgatgagtatgggggctcaattgaaaatcgtgcacgttttactctggaagtcgttgacgcggtggttgatgccatcggcccagaaaaagtgggtttacgtctgagtccgtacggcacgttcaactctatgtcgggcggcgcggaaacgtgtattgttgctcagtatgcctatgtcctgggtgagctggagcgtcgcgccaaggcggggaaacgcctggcgtttgttcatttagtcgaaccacgcgtgacagacccttctctggttgagggggcgggcgaatactcagagggcactaacgattttgcttattccatttggaaaggtccgattatccgtgccggcaactatgcactacatcctgaagtagtgcgcgaacaagttaaggaccctcgcaccctgatcggctacggccgcttctttatttcaaatccagacctggtttaccgcttagaagaaggtctgccactgaacaagtatgaccgttctacgttctacaccatgagcgcggagggttacatcgactacccgacctacgaagaagccgtagatctgggctggaacaaaaac

SEQ ID NO: 246 - protein, 400 aa, synthetic construct
  REGION 1..400: note = Variant of ERED chimera of Old Yellow Enzyme
MSFVKDFKPQALRDTNLFEPIKIGNTQLAHRVVMPPLTRMRATHPGNIPNKEWAAVYYGQRAQRPGTMIITEATFISPQAGGYDNKPGVWSDEQVAEWKNIFLAIHDCQSFAWVQLQVLGWAAFPDTLARDGLRYDSASDNVYMNAEQEEKAKKANNPQHSITKDEIKQYVKEYVQAAKNSIAAGADGVEIHSANGYLLNQFLDPHSNNRTDEYGGSIENRARFTLEVVDAVVDAIGPEKVGLRLSPYGTFNSMSGGAETCIVAQYAYVLGELERRAKAGKRLAFVHLVEPRVTDPSLVEGAGEYSEGTNDFAYSIWKGPIIRAGNYALHPEVVREQVKDPRTLIGYGRFFISNPDLVYRLEEGLPLNKYDRSTFYTMSAEGYIDYPTYEEAVDLGWNKN

SEQ ID NO: 247 - DNA, 1200 bp, synthetic construct
  misc_feature 1..1200: note = Variant of ERED chimera of Old Yellow Enzyme
  source 1..1200: mol_type = other DNA
atgtctttctcgaaggacttcaagccgcaagcactgcgcgacaccaacctgttcgaacctattaaaattgggaacacacagctggctcatcgcgttgtaatgcctccgctgacccgcatgcgcgctacccatccgggcaacattccgaacaaggagtgggctgcggtttactacggccagcgtgcacagcgtccggggacaatgattatcacggaggcgacgttcatcagcccgcaggcaggtgggtacgataacaagcctggtgtttggtcagacgaacaggttgccgaatggaagaacatcttcctggctattcatgactgtcagtcatttgcgtgggtgcaactgcaggtcctgggctgggccgcctttccggataccctggcgcgtgatgggttacgttacgattctgcctccgataatgtgtatatgaatgcggaacaggaggaaaaagcgaaaaaagctaacaatccgcaacatagcattactaaagacgaaattaaacaatatgtcaaagaatatgttcaggcagctaagaactcgatcgctgcgggtgcggacggcgtggaaattcactcagccaacggttatctgttaaatcagttcctggatccgcacagcaacaaccgcaccgatgagtatgggggctcaattgaaaatcgtgcacgttttactctggaagtcgttgacgcggtggttgatgccatcggcccagaaaaagtgggtttacgtctgagtccgtacggcacgttcaactctatgtcgggcggcgcggaaacgtgtattgttgctcagtatgcctatgtcctgggtgagctggagcgtcgcgccaaggcggggaaacgcctggcgtttgttcatttagtcgaaccacgcgtgacagacccttctctggttgagggggagggcgaatactcagagggcactaacgattttgcttattccatttggaaaggtccgattatccgtgccggcaactatgcactacatcctgaagtagtgcgcgaacaagttaaggaccctcgcaccctgatcggctacggccgcttctttatttcaaatccagacctggtttaccgcttagaagaaggtctgccactgaacaagtatgaccgttctacgttctacaccatgagcgcggagggttacatcgactacccgacctacgaagaagccgtagatctgggctggaacaaaaac

SEQ ID NO: 248 - protein, 400 aa, synthetic construct
  REGION 1..400: note = Variant of ERED chimera of Old Yellow Enzyme
MSFSKDFKPQALRDTNLFEPIKIGNTQLAHRVVMPPLTRMRATHPGNIPNKEWAAVYYGQRAQRPGTMIITEATFISPQAGGYDNKPGVWSDEQVAEWKNIFLAIHDCQSFAWVQLQVLGWAAFPDTLARDGLRYDSASDNVYMNAEQEEKAKKANNPQHSITKDEIKQYVKEYVQAAKNSIAAGADGVEIHSANGYLLNQFLDPHSNNRTDEYGGSIENRARFTLEVVDAVVDAIGPEKVGLRLSPYGTFNSMSGGAETCIVAQYAYVLGELERRAKAGKRLAFVHLVEPRVTDPSLVEGEGEYSEGTNDFAYSIWKGPIIRAGNYALHPEVVREQVKDPRTLIGYGRFFISNPDLVYRLEEGLPLNKYDRSTFYTMSAEGYIDYPTYEEAVDLGWNKN

SEQ ID NO: 249 - DNA, 1200 bp, synthetic construct
  misc_feature 1..1200: note = Variant of ERED chimera of Old Yellow Enzyme
  source 1..1200: mol_type = other DNA
atgtctttcgttaaggacttcaagccgcaagcactgcgcgacaccaacctgttcgaacctattaaaattgggaacacacagctggctcatcgcgttgtaatgcctccgctgacccgcatgcgcgctacccatccgggcaacattccgaacaaggagtgggctgcggtttactacggccagcgtgcacagcgtccggggacaatgattatcacggaggcgacgttcatcagcccgcaggcaggtgggtacgataacaagcctggtgtttggtcagacgaacaggttgccgaatggaagaacatcttcctggctattcatgactgtcagtcatttgcgtgggtgcaactgcaggtcctgggctgggccgcctttccggataccctggcgcgtgatgggttacgttacgattctgcctccgataatgtgtatatgaatgcggaacaggaggaaaaagcgaaaaaagctaacaatccgcaacatagcattactaaagacgaaattaaacaatatgtcaaagaatatgttcaggcagctaagaactcgatcgctgcgggtgcggacggcgtggaaattcactcagccaacggttatctgttaaatcagttcctggatccgcacagcaacaaccgcaccgatgagtatgggggctcaattgaaaatcgtgcacgttttactctggaagtcgttgacgcggtggttgatgccatcggcccagaaaaagtgggtttacgtctgagtccgtacggcacgttcaactctatgtcgggcggcgcggaaacgtgtattgttgctcagtatgcctatgtcctgggtgagctggagcgtcgcgccaaggcggggaaacgcctggcgtttgttcatttagtcgaaccacgcgtgacagacccttctctgggggagggggagggcgaatactcagagggcactaacgattttgcttattccatttggaaaggtccgattatccgtgccggcaactatgcactacatcctgaagtagtgcgcgaacaagttaaggaccctcgcaccctgatcggctacggccgcttctttatttcaaatccagacctggtttaccgcttagaagaaggtctgccactgaacaagtatgaccgttctacgttctacaccatgagcgcggagggttacatcgactacccgacctacgaagaagccgtagatctgggctggaacaaaaac

SEQ ID NO: 250 - protein, 400 aa, synthetic construct
  REGION 1..400: note = Variant of ERED chimera of Old Yellow Enzyme
MSFVKDFKPQALRDTNLFEPIKIGNTQLAHRVVMPPLTRMRATHPGNIPNKEWAAVYYGQRAQRPGTMIITEATFISPQAGGYDNKPGVWSDEQVAEWKNIFLAIHDCQSFAWVQLQVLGWAAFPDTLARDGLRYDSASDNVYMNAEQEEKAKKANNPQHSITKDEIKQYVKEYVQAAKNSIAAGADGVEIHSANGYLLNQFLDPHSNNRTDEYGGSIENRARFTLEVVDAVVDAIGPEKVGLRLSPYGTFNSMSGGAETCIVAQYAYVLGELERRAKAGKRLAFVHLVEPRVTDPSLGEGEGEYSEGTNDFAYSIWKGPIIRAGNYALHPEVVREQVKDPRTLIGYGRFFISNPDLVYRLEEGLPLNKYDRSTFYTMSAEGYIDYPTYEEAVDLGWNKN

SEQ ID NO: 251 - DNA, 1200 bp, synthetic construct
  misc_feature 1..1200: note = Variant of ERED chimera of Old Yellow Enzyme
  source 1..1200: mol_type = other DNA
atgtctttcgttaaggacttcaagccgcaagcactgcgcgacaccaacctgttcgaacctattaaaattgggaacacacagctggctcatcgcgttgtaatgcctccgctgacccgcatgcgcgctacccatccgggcaacattccgaacaaggagtgggctgcggtttactacggccagcgtgcacagcgtccggggacaatgattatcacggaggcgacgttcatcagcccgcaggcaggtgggtacgataacaagcctggtgtttggtcagacgaacaggttgccgaatggaagaacatcttcctggctattcatgactgtcagtcatttgcgtgggtgcaactgcaggtcctgggctgggccgcctttccggataccctggcgcgtgatgggttacgttacgattctgcctccgataatgtgtatatgaatgcggaacaggaggaaaaagcgaaaaaagctaacaatccgcaacatagcattactaaagacgaaattaaacaatatgtcaaagaatatgttcaggcagctaagaactcgatcgctgcgggtgcggacggcgtggaaattcactcagccaacggttatctgttaaatcagttcctggatccgcacagcaacaaccgcaccgatgagtatgggggctcaattgaaaatcgtgcacgttttactctggaagtcgttgacgcggtggttgatgccatcggcccagaaaaagtgggtttacgtctgagtccgtacggcacgttcaactctatgtcgggcggcgcggaaacgtgtattgttgctcagtatgcctatgtcctgggtgagctggagcgtcgcgccaaggcggggaaacgcctggcgtttgttcatttagtcgaaccacgcgtgacagacccttctctggttgagggggagggcgaatactcagagggcactaacgattttgcttattccatttggaaaggtccgattatccgtgccggcaactatgcactacatcctgaagtagtgcgcgaacaagttaaggacggtcgcaccctgatcggctacggccgcttctttatttcaaatccagacctggtttaccgcttagaagaaggtctgccactgaacaagtatgaccgttctacgttctacaccatgagcgcggagggttacatcgactacccgacctacgaagaagccgtagatctgggctggaacaaaaac

SEQ ID NO: 252 - protein, 400 aa, synthetic construct
  REGION 1..400: note = Variant of ERED chimera of Old Yellow Enzyme
MSFVKDFKPQALRDTNLFEPIKIGNTQLAHRVVMPPLTRMRATHPGNIPNKEWAAVYYGQRAQRPGTMIITEATFISPQAGGYDNKPGVWSDEQVAEWKNIFLAIHDCQSFAWVQLQVLGWAAFPDTLARDGLRYDSASDNVYMNAEQEEKAKKANNPQHSITKDEIKQYVKEYVQAAKNSIAAGADGVEIHSANGYLLNQFLDPHSNNRTDEYGGSIENRARFTLEVVDAVVDAIGPEKVGLRLSPYGTFNSMSGGAETCIVAQYAYVLGELERRAKAGKRLAFVHLVEPRVTDPSLVEGEGEYSEGTNDFAYSIWKGPIIRAGNYALHPEVVREQVKDGRTLIGYGRFFISNPDLVYRLEEGLPLNKYDRSTFYTMSAEGYIDYPTYEEAVDLGWNKN

SEQ ID NO: 253 - DNA, 1200 bp, synthetic construct
  misc_feature 1..1200: note = Variant of ERED chimera of Old Yellow Enzyme
  source 1..1200: mol_type = other DNA
atgtctttcgttaaggacttcaagccgcaagcactgcgcgacaccaacctgttcgaacctattaaaattgggaacacacagctggctcatcgcgttgtaatgcctccgctgacccgcatgcgcgctacccatccgggcaacattccgaacaaggagtgggctgcggtttactacggccagcgtgcacagcgtccggggacaatgattatcacggaggcgacgttcatcagcccgcaggcaggtgggtacgataacaagcctggtgtttggtcagacgaacaggttgccgaatggaagaacatcttcctggctattcatgactgtcagtcatttgcgtgggtgcaactgcaggtcctgggctgggccgcctttccggataccctggcgcgtgatgggttacgttacgattctgcctccgataatgtgtatatgaatgcggaacaggaggaaaaagcgaaaaaagctaacaatccgcaacatagcattactaaagacgaaattaaacaatatgtcaaagaatatgttcaggcagctaagaactcgatcgctgcgggtgcggacggcgtggaaattcactcagccaacggttatctgttaaatcagttcctggatccgcacagcaacaaccgcaccgatgagtatgggggctcaattgaaaatcgtgcacgttttactctggaagtcgttgacgcggtggttgatgccatcggcccagaaaaagtgggtttacgtctgagtccgtacggcacgttcaactctatgtcgggcggcgcggaaacgtgtattgttgctcagtatgcctatgtcctgggtgagctggagcgtcgcgccaaggcggggaaacgcctggcgtttgttcatttagtcgaaccacgcgtgacagacccttctctggttgagggggagggcgaatactcagagggcactaacgattttgcttattccatttggaaaggtccgattatccgtgccggcaactatgcactacatcctgaagtagtgcgcgaacaagttaaggaccctcgcaccctgatcggctacggccgcttctttatttcaaatccagacctggttgagcgcttagaagaaggtctgccactgaacaagtatgaccgttctacgttctacaccatgagcgcggagggttacatcgactacccgacctacgaagaagccgtagatctgggctggaacaaaaac

SEQ ID NO: 254 - protein, 400 aa, synthetic construct
  REGION 1..400: note = Variant of ERED chimera of Old Yellow Enzyme
MSFVKDFKPQALRDTNLFEPIKIGNTQLAHRVVMPPLTRMRATHPGNIPNKEWAAVYYGQRAQRPGTMIITEATFISPQAGGYDNKPGVWSDEQVAEWKNIFLAIHDCQSFAWVQLQVLGWAAFPDTLARDGLRYDSASDNVYMNAEQEEKAKKANNPQHSITKDEIKQYVKEYVQAAKNSIAAGADGVEIHSANGYLLNQFLDPHSNNRTDEYGGSIENRARFTLEVVDAVVDAIGPEKVGLRLSPYGTFNSMSGGAETCIVAQYAYVLGELERRAKAGKRLAFVHLVEPRVTDPSLVEGEGEYSEGTNDFAYSIWKGPIIRAGNYALHPEVVREQVKDPRTLIGYGRFFISNPDLVERLEEGLPLNKYDRSTFYTMSAEGYIDYPTYEEAVDLGWNKN

SEQ ID NO: 255 - DNA, 1200 bp, synthetic construct
  misc_feature 1..1200: note = Variant of ERED chimera of Old Yellow Enzyme
  source 1..1200: mol_type = other DNA
atgtctttcgttaaggacttcaagccgcaagcactgcgcgacaccaacctgttcgaacctattaaaattgggaacacacagctggctcatcgcgttgtaatgcctccgctgacccgcatgcgcgctacccatccgggcaacattccgaacaaggagtgggctgcggtttactacggccagcgtgcacagcgtccggggacaatgattatcacggaggcgacgttcatcagcccgcaggcaggtgggtacgataacaagcctggtgtttggtcagacgaacaggttgccgaatggaagaacatcttcctggctattcatgactgtcagtcatttgcgtgggtgcaactgcaggtcctgggctgggccgcctttccggataccctggcgcgtgatgggttacgttacgattctgcctccgataatgtgtatatgaatccggaacaggaggaaaaagcgaaaaaagctaacaatccgcaacatagcattactaaagacgaaattaaacaatatgtcaaagaatatgttcaggcagctaagaactcgatcgctgcgggtgcggacggcgtggaaattcactcagccaacggttatctgttaaatcagttcctggatccgcacagcaacaaccgcaccgatgagtatgggggctcaattgaaaatcgtgcacgttttactctggaagtcgttgacgcggtggttgatgccatcggcccagaaaaagtgggtttacgtctgagtccgtacggcacgttcaactctatgtcgggcggcgcggaaacgtgtattgttgctcagtatgcctatgtcctgggtgagctggagcgtcgcgccaaggcggggaaacgcctggcgtttgttcatttagtcgaaccacgcgtgacagacccttctctggttgagggggagggcgaatactcagagggcactaacgattttgcttattccatttggaaaggtccgattatccgtgccggcaactatgcactacatcctgaagcagtgcgcgaacaagttaaggaccctcgcaccctgatcggctacggccgcttctttatttcaaatccagacctggtttaccgcttagaagaaggtctgccactgaacaagtatgaccgttctacgttctacaccatgagcgcggagggttacatcgactacccgacctacgaagaagccgtagatctgggctggaacaaaaac

SEQ ID NO: 256 - protein, 400 aa, synthetic construct
  REGION 1..400: note = Variant of ERED chimera of Old Yellow Enzyme
MSFVKDFKPQALRDTNLFEPIKIGNTQLAHRVVMPPLTRMRATHPGNIPNKEWAAVYYGQRAQRPGTMIITEATFISPQAGGYDNKPGVWSDEQVAEWKNIFLAIHDCQSFAWVQLQVLGWAAFPDTLARDGLRYDSASDNVYMNPEQEEKAKKANNPQHSITKDEIKQYVKEYVQAAKNSIAAGADGVEIHSANGYLLNQFLDPHSNNRTDEYGGSIENRARFTLEVVDAVVDAIGPEKVGLRLSPYGTFNSMSGGAETCIVAQYAYVLGELERRAKAGKRLAFVHLVEPRVTDPSLVEGEGEYSEGTNDFAYSIWKGPIIRAGNYALHPEAVREQVKDPRTLIGYGRFFISNPDLVYRLEEGLPLNKYDRSTFYTMSAEGYIDYPTYEEAVDLGWNKN

SEQ ID NO: 257 - DNA, 1200 bp, synthetic construct
  misc_feature 1..1200: note = Variant of ERED chimera of Old Yellow Enzyme
  source 1..1200: mol_type = other DNA
atgtctttcgttaaggacttcaagccgcaagcactgcgcgacaccaacctgttcgaacctattaaaattgggaacacacagctggctcatcgcgttgtaatgcctccgctgacccgcatgcgcgctacccatccgggcaacattccgaacaaggagtgggctgcggtttactacggccagcgtgcacagcgtccggggacaatgattatcacggaggcgacgttcatcagcccgcaggcaggtgggtacgataacaagcctggtgtttggtcagacgaacaggttgccgaatggaagaacatcttcctggctattcatgactgtcagtcatttgcgtgggtgcaactgcaggtcctgggctgggccgcctttccggataccctggcgcgtgatgggttacgttacgattctgcctccgataatgtgtatatgaatgcggaacaggaggaaaaagcgaaaaaagctaacaatccgcaacatagcattactaaagacgaaattaaacaatatgtcaaagaatatgttcaggcagctaagaactcgatcgctgcgggtgcggacggcgtggaaattcactcagccaacggttatctgttaaatcagttcctggatccgcacagcaacaaccgcaccgatgagtatgggggctcaattgaaaatcgtgcacgttttactctggaagtcgttgacgcggtggttgatgccatcggcccagaaaaagtgggtttacgtctgagtccgtacggcacgttcaactctatgtcgggcggcgcggaaacgtgtattgttgctcagtatgcctatgtcctgggtgagctggagcgtcgcgccaaggcggggaaacgcctggcgtttgttcatttagtcgaaccacgcgtgacagacccttctctggttgagggggagggcgaatactcagagggcactaacgattttgcttattccatttggaaaggtccgattatccgtgccggcaactatgcactacatcctgaagtagtgcgcgaacaagttaaggaccctcgcaccctgatcggctacggccgcttctttatttcaaatccagacctggtttaccgcttagaagaaggtctgccactgaacaagtatgaccgttctacgttctacaccaggagcgcggagggttacatcgactacccgacctacgaagaagccgtagatctgggctggaacaaaaac

SEQ ID NO: 258 - protein, 400 aa, synthetic construct
  REGION 1..400: note = Variant of ERED chimera of Old Yellow Enzyme
MSFVKDFKPQALRDTNLFEPIKIGNTQLAHRVVMPPLTRMRATHPGNIPNKEWAAVYYGQRAQRPGTMIITEATFISPQAGGYDNKPGVWSDEQVAEWKNIFLAIHDCQSFAWVQLQVLGWAAFPDTLARDGLRYDSASDNVYMNAEQEEKAKKANNPQHSITKDEIKQYVKEYVQAAKNSIAAGADGVEIHSANGYLLNQFLDPHSNNRTDEYGGSIENRARFTLEVVDAVVDAIGPEKVGLRLSPYGTFNSMSGGAETCIVAQYAYVLGELERRAKAGKRLAFVHLVEPRVTDPSLVEGEGEYSEGTNDFAYSIWKGPIIRAGNYALHPEVVREQVKDPRTLIGYGRFFISNPDLVYRLEEGLPLNKYDRSTFYTRSAEGYIDYPTYEEAVDLGWNKN

SEQ ID NO: 259 - DNA, 1200 bp, synthetic construct
  misc_feature 1..1200: note = Variant of ERED chimera of Old Yellow Enzyme
  source 1..1200: mol_type = other DNA
atgtctttcgttaaggacttcaagccgcaagcactgcgcgacaccaacctgttcgaacctattaaaattgggaacacacagctggctcatcgcgttgtaatgcctccgctgacccgcatgcgcgctacccatccgggcaacattccgaacaaggagtgggctgcggtttactacggccagcgtgcacagcgtccggggacaatgattatcacggaggcgacgttcatcagcccgcaggcaggtgggtacgataacaagcctggtgtttggtcagacgaacaggttgccgaatggaagaacatcttcctggctattcatgactgtcagtcatttgcgtgggtgcaactgcaggtcctgggctgggccgcctttccggataccctggcgcgtgatgggttacgttacgattctgcctccgataatgtgtatatgaatgcggaacaggaggaaaaagcgaaaaaagctaacaatccgcaacatagcattactaaagacgaaattaaacaatatgtcaaagaatatgttcaggcagctaagaactcgatcgctgcgggtgcggacggcgtggaaattcactcagccaacggttatctgttaaatcagttcctggatccgcacagcaacaaccgcaccgatgagtatgggggctcaattgaaaatcgtgcacgttttactctggaagtcgttgacgcggtggttgatgccatcggcccagaaaaagtgggtttacgtctgagtccgtacggcacgttcaactctatgtcgggcggcgcggaaacgtgtattgttgctcagtatgcctatgtcctgggtgagctggagcgtcgcgccaaggcggggaaacgcctggcgtttgttcatttagtcgaaccacgcgtgacagacccttttctggttgagggggagggcgaatactcagagggcactaacgattttgcttattccatttggaaaggtccgattatccgtgccggcaactatgcactacatcctgaagtagtgcgcgaacaagttaaggaccctcgcaccctgatcggctacggccgcttctttatttcaaatccagacctggtttaccgcttagaagaaggtctgccactgaacaagtatgaccgttctacgttctacaccatgagcgcggagggttacatcgactacccgacctacgaagaagccgtagatctgggctggaacaaaaac

SEQ ID NO: 260 - protein, 400 aa, synthetic construct
  REGION 1..400: note = Variant of ERED chimera of Old Yellow Enzyme
MSFVKDFKPQALRDTNLFEPIKIGNTQLAHRVVMPPLTRMRATHPGNIPNKEWAAVYYGQRAQRPGTMIITEATFISPQAGGYDNKPGVWSDEQVAEWKNIFLAIHDCQSFAWVQLQVLGWAAFPDTLARDGLRYDSASDNVYMNAEQEEKAKKANNPQHSITKDEIKQYVKEYVQAAKNSIAAGADGVEIHSANGYLLNQFLDPHSNNRTDEYGGSIENRARFTLEVVDAVVDAIGPEKVGLRLSPYGTFNSMSGGAETCIVAQYAYVLGELERRAKAGKRLAFVHLVEPRVTDPFLVEGEGEYSEGTNDFAYSIWKGPIIRAGNYALHPEVVREQVKDPRTLIGYGRFFISNPDLVYRLEEGLPLNKYDRSTFYTMSAEGYIDYPTYEEAVDLGWNKN

SEQ ID NO: 261 - DNA, 1200 bp, synthetic construct
  misc_feature 1..1200: note = Variant of ERED chimera of Old Yellow Enzyme
  source 1..1200: mol_type = other DNA
atgtctttcgttaaggacttcaagccgcaagcactgcgcgacaccaacctgttcgaacctattaaaattgggaacacacagctggctcatcgcgttgtaatgcctccgctgacccgcatgcgcgctacccatccgggcaacattccgaacaaggagtgggctgcggtttactacggccagcgtgcacagcgtccggggacaatgattatcacggaggcgacgttcatcagcccgcaggcaggtgggtacgataacaagcctggtgtttggtcagacgaacaggttgccgaatggaagaacatcttcctggctattcatgactgtcagtcatttgcgtgggtgcaactgcaggtcctgggctgggccgcctttccggataccctggcgcgtgatgggttacgttacgattctgcctccgataatgtgtatatgaatgcggaacaggaggaaaaagcgaaaaaagctaacaatccgcaacatagcattactaaagacgaaattaaacaatatgtcaaagaatatgttcaggcagctaagaactcgatcgctgcgggtgcggacggcgtggaaattcactcagccaacggttatctgttaaatcagttcctggatccgcacagcaacaaccgcaccgatgagtatgggggctcaattgaaaatcgtgcacgttttactctggaagtcgttgacgcggtggttgatgccatcggcccagaaaaagtgggtttacgtctgagtccgtacggcacgttcaactctatgtcgggcggcgcggaaacgtgtattgttgctcagtatgcctatgtcctgggtgagctggagcgtcgcgccaaggcggggaaacgcctggcgtttgttcatttagtcgaaccacgcgtgacagacccttggctggttgagggggagggcgaatactcagagggcactaacgattttgcttattccatttggaaaggtccgattatccgtgccggcaactatgcactacatcctgaagtagtgcgcgaacaagttaaggaccctcgcaccctgatcggctacggccgcttctttatttcaaatccagacctggtttaccgcttagaagaaggtctgccactgaacaagtatgaccgttctacgttctacaccatgagcgcggagggttacatcgactacccgacctacgaagaagccgtagatctgggctggaacaaaaac

SEQ ID NO: 262 - protein, 400 aa, synthetic construct
  REGION 1..400: note = Variant of ERED chimera of Old Yellow Enzyme
MSFVKDFKPQALRDTNLFEPIKIGNTQLAHRVVMPPLTRMRATHPGNIPNKEWAAVYYGQRAQRPGTMIITEATFISPQAGGYDNKPGVWSDEQVAEWKNIFLAIHDCQSFAWVQLQVLGWAAFPDTLARDGLRYDSASDNVYMNAEQEEKAKKANNPQHSITKDEIKQYVKEYVQAAKNSIAAGADGVEIHSANGYLLNQFLDPHSNNRTDEYGGSIENRARFTLEVVDAVVDAIGPEKVGLRLSPYGTFNSMSGGAETCIVAQYAYVLGELERRAKAGKRLAFVHLVEPRVTDPWLVEGEGEYSEGTNDFAYSIWKGPIIRAGNYALHPEVVREQVKDPRTLIGYGRFFISNPDLVYRLEEGLPLNKYDRSTFYTMSAEGYIDYPTYEEAVDLGWNKN

SEQ ID NO: 263 - DNA, 1200 bp, synthetic construct
  misc_feature 1..1200: note = Variant of ERED chimera of Old Yellow Enzyme
  source 1..1200: mol_type = other DNA
atgtctttcgttaaggacttcaagccgcaagcactgcgcgacaccaacctgttcgaacctattaaaattgggaacacacagctggctcatcgcgttgtaatgcctccgctgacccgcatgcgcgctacccatccgggcaacattccgaacaaggagtgggctgcggtttactacggccagcgtgcacagcgtccggggacaatgattatcacggaggcgacgttcatcagcccgcaggcaggtgggtacgataacaagcctggtgtttggtcagacgaacaggttgccgaatggaagaacatcttcctggctattcatgactgtcagtcatttgcgtgggtgcaactgcaggtcctgggctgggccgcctttccggataccctggcgcgtgatgggttacgttacgattctgcctccgataatgtgtatatgaatgcggaacaggaggaaaaagcgaaaaaagctaacaatccgcaacatagcattactaaagacgaaattaaacaatatgtcaaagaatatgttcaggcagctaagaactcgatcgctgcgggtgcggacggcgtggaaattcactcagccaacggttatctgttaaatcagttcctggatccgcacagcaacaaccgcaccgatgagtatgggggctcaattgaaaatcgtgcacgttttactctggaagtcgttgacgcggtggttgatgccatcggcccagaaaaagtgggtttacgtctgagtccgtacggcacgttcaactctatgtcgggcggcgcggaaacgtgtattgttgctcagtatgcctatgtcctgggtgagctggagcgtcgcgccaaggcggggaaacgcctggcgtttgttcatttagtcgaaccacgcgtgacagacccttctctggttgagggggagggcgaatactcagagggcactaacgattttgcttattccatttggaaaggtccgattatccgtgccggcaactatgcactacatcctgaagtagtgcgcgaacaagttaaggaccctcgcaccctgatcggctacggccgcttctttatttcaaatccagacctggtttaccgcttagaagaaggtctgccactgaacaagtatgaccgttctacgttctacaccccgagcgcggagggttacatcgactacccgacctacgaagaagccgtagatctgggctggaacaaaaac

SEQ ID NO: 264 - protein, 400 aa, synthetic construct
  REGION 1..400: note = Variant of ERED chimera of Old Yellow Enzyme
MSFVKDFKPQALRDTNLFEPIKIGNTQLAHRVVMPPLTRMRATHPGNIPNKEWAAVYYGQRAQRPGTMIITEATFISPQAGGYDNKPGVWSDEQVAEWKNIFLAIHDCQSFAWVQLQVLGWAAFPDTLARDGLRYDSASDNVYMNAEQEEKAKKANNPQHSITKDEIKQYVKEYVQAAKNSIAAGADGVEIHSANGYLLNQFLDPHSNNRTDEYGGSIENRARFTLEVVDAVVDAIGPEKVGLRLSPYGTFNSMSGGAETCIVAQYAYVLGELERRAKAGKRLAFVHLVEPRVTDPSLVEGEGEYSEGTNDFAYSIWKGPIIRAGNYALHPEVVREQVKDPRTLIGYGRFFISNPDLVYRLEEGLPLNKYDRSTFYTPSAEGYIDYPTYEEAVDLGWNKN

SEQ ID NO: 265 - DNA, 1200 bp, synthetic construct
  misc_feature 1..1200: note = Variant of ERED chimera of Old Yellow Enzyme
  source 1..1200: mol_type = other DNA
atgtctttcaccaaggacttcaagccgcaagcactgcgcgacaccaacctgttcgaacctattaaaattgggaacacacagctggctcatcgcgttgtaatgcctccgctgacccgcatgcgcgctacccatccgggcaacattccgaacaaggagtgggctgcggtttactacggccagcgtgcacagcgtccggggacaatgattatcacggaggcgacgttcatcagcccgcaggcaggtgggtacgataacaagcctggtgtttggtcagacgaacaggttgccgaatggaagaatatcttcctggctattcatgactgtcagtcatttgcgtgggtgcaactgcaggtcctgggctgggccgcctttccggataccctggcgcgtgatgggttacgttacgattctgcctccgataatgtgtatatgaatgcggaacaggaggaaaaagcgaaaaaagctaacaatccgcaacatagcattactaaagacgaaattaaacaatatgtcaaagaatatgttcaggcagctaagaactcgatcgctgcgggtgcggacggcgtggaaattcactcagccaacggttatctgttaaatcagttcctggatccgcacagcaaccgtcgcaccgatgagtatgggggctcaattgaaaatcgtgcacgttttactctggaagtcgttgacgcggtggttgatgccatcggcccagaaaaagtgggtttacgtctgagtccgtacggcacgttcaactctatgtcgggcggcgcggaaacgtgtattgttgctcagtatgcctatgtcctgggtgagctggagcgtcgcgccaaggcggggaaacgcctggcgtttgttcatttagtcgaaccacgcgtgacagacccttggctggttgagggggagggcgaatactcagagggcactaacgattttgcttattccatttggaaaggtccgattatccgtgccggcaactatgcactacatcctgaagtcgtgcgcgaacaagttaaggaccctcgcaccctgatcggctacggccgcttctttatttcaaatccagacctggttgaacgcttagaagaaggtctgccactgaacaagtatgaccgttctacgttctacaccccaagcgcggagggttacatcgactacccgacctacgaagaagccgtagatctgggctggaacaaaaac

SEQ ID NO: 266 - protein, 400 aa, synthetic construct
  REGION 1..400: note = Variant of ERED chimera of Old Yellow Enzyme
MSFTKDFKPQALRDTNLFEPIKIGNTQLAHRVVMPPLTRMRATHPGNIPNKEWAAVYYGQRAQRPGTMIITEATFISPQAGGYDNKPGVWSDEQVAEWKNIFLAIHDCQSFAWVQLQVLGWAAFPDTLARDGLRYDSASDNVYMNAEQEEKAKKANNPQHSITKDEIKQYVKEYVQAAKNSIAAGADGVEIHSANGYLLNQFLDPHSNRRTDEYGGSIENRARFTLEVVDAVVDAIGPEKVGLRLSPYGTFNSMSGGAETCIVAQYAYVLGELERRAKAGKRLAFVHLVEPRVTDPWLVEGEGEYSEGTNDFAYSIWKGPIIRAGNYALHPEVVREQVKDPRTLIGYGRFFISNPDLVERLEEGLPLNKYDRSTFYTPSAEGYIDYPTYEEAVDLGWNKN

SEQ ID NO: 267 - DNA, 1200 bp, synthetic construct
  misc_feature 1..1200: note = Variant of ERED chimera of Old Yellow Enzyme
  source 1..1200: mol_type = other DNA
atgtctttcgttaaggacttcaagccgcaagcactgcgcgacaccaacctgttcgaacctattaaaattgggaacacacagctggctcatcgcgttgtaatgcctccgctgacccgcatgcgcgctacccatccgggcaacattccgaacaaggagtgggctgcggtttactacggccagcgtgcacagcgtccggggacaatgattatcacggaggcgacgttcatcagcccgcaggcaggtgggtacgataacaagcctggtgtttggtcagacgaacaggttgccgaatggaagaacatcttcctggctattcatgactgtcagtcatttgcgtgggtgcaactgcaggtcctgggctgggccgcctttccggataccctggcgcgtgatgggttacgttacgattctgcctccgataatgtgtatatgaatgcggaacaggaggaaaaagcgaaaaaagctaacaatccgcaacatagcattactaaagacgaaattaaacaatatgtcaaagaatatgttcaggcagctaagaactcgatcgctgcgggtgcggacggcgtggaaattcactcagccaacggttatctgttaaatcagttcctggatccgcacagcaaccgtcgcaccgatgagtatgggggctcaattgaaaatcgtgcacgttttactctggaagtcgttgacgcggtggttgatgccatcggcccagaaaaagtgggtttacgtctgagtccgtacggcacgttcaactctatgtcgggcggcaaagaaacgtgtattgttgctcagtatgcctatgtcctgggtgagctggagcgtcgcgccaaggcggggaaacgcctggcgtttgttcatttagtcgaaccacgcgtgacagacccttggctggttgagggggagggcgaatactcagagggcactaacgattttgcttattccatttggaaaggtccgattatccgtgccggcaactatgcactacatcctgaagtagtgcgcgaacaagttaaggaccctcgcaccctgatcggctacggccgcttctttatttcaaatccagacctggtttaccgcttagaagaaggtctgccactgaacaagtatgaccgttctacgttctacaccatgagcgcggagggttacatcgactacccgacctacgaagaagccgtagatctgggctggaacaaaaac

SEQ ID NO: 268 - protein, 400 aa, synthetic construct
  REGION 1..400: note = Variant of ERED chimera of Old Yellow Enzyme
MSFVKDFKPQALRDTNLFEPIKIGNTQLAHRVVMPPLTRMRATHPGNIPNKEWAAVYYGQRAQRPGTMIITEATFISPQAGGYDNKPGVWSDEQVAEWKNIFLAIHDCQSFAWVQLQVLGWAAFPDTLARDGLRYDSASDNVYMNAEQEEKAKKANNPQHSITKDEIKQYVKEYVQAAKNSIAAGADGVEIHSANGYLLNQFLDPHSNRRTDEYGGSIENRARFTLEVVDAVVDAIGPEKVGLRLSPYGTFNSMSGGKETCIVAQYAYVLGELERRAKAGKRLAFVHLVEPRVTDPWLVEGEGEYSEGTNDFAYSIWKGPIIRAGNYALHPEVVREQVKDPRTLIGYGRFFISNPDLVYRLEEGLPLNKYDRSTFYTMSAEGYIDYPTYEEAVDLGWNKN

SEQ ID NO: 269 - DNA, 1200 bp, synthetic construct
  misc_feature 1..1200: note = Variant of ERED chimera of Old Yellow Enzyme
  source 1..1200: mol_type = other DNA
atgtctttcaccaaggacttcaagccgcaagcactgcgcgacaccaacctgttcgaacctattaaaattgggaacacacagctggctcatcgcgttgtaatgcctccgctgacccgcatgcgcgctacccatccgggcaacattccgaacaaggagtgggctgcggtttactacggccagcgtgcacagcgtccggggacaatgattatcacggaggcgacgttcatcagcccgcaggcaggtgggtacgataacaagcctggtgtttggtcagacgaacaggttgccgaatggaagaatatcttcctggctattcatgactgtcagtcatttgcgtgggtgcaactgcaggtcctgggctgggccgcctttccggataccctggcgcgtgatgggttacgttacgattctgcctccgataatgtgtatatgaatgcggaacaggaggaacgcgcgaaaaaagctaacaatccgcaacatagcattactaaagacgaaattaaacaatatgtcaaagaatatgttcaggcagctaagaactcgatcgctgcgggtgcggacggcgtggaaattcactcagccaacggttatctgttaaatcagttcctggatccgcacagcaacaatcgcaccgatgagtatgggggctcaattgaaaatcgtgcacgttttactctggaagtcgttgacgcggtggttgatgccatcggcccagaaaaagtgggtttacgtctgagtccgtacggcacgttcaactctatgtcgggcggcgctgaaacgtgtattgttgctcagtatgcctatgtcctgggtgagctggagcgtcgcgccaaggcggggaaacgcctggcgtttgttcatttagtcgaaccacgcgtgacagacccttggctggttgagggggagggcgaatactcagagggcactaacgattttgcttattccatttggaaaggtccgattatccgtgccggcaactatgcactacatcctgaagccgtgcgcgaacaagttaaggaccctcgcaccctgatcggctacggccgcttctttatttcaaatccagacctggtttaccgcttagaagaaggtctgccactgaacaagtatgaccgttctacgttctacaccatgagcgcggagggttacatcgactacccgacctacgaagaagccgtagatctgggctggaacaaaaac

SEQ ID NO: 270 - protein, 400 aa, synthetic construct
  REGION 1..400: note = Variant of ERED chimera of Old Yellow Enzyme
MSFTKDFKPQALRDTNLFEPIKIGNTQLAHRVVMPPLTRMRATHPGNIPNKEWAAVYYGQRAQRPGTMIITEATFISPQAGGYDNKPGVWSDEQVAEWKNIFLAIHDCQSFAWVQLQVLGWAAFPDTLARDGLRYDSASDNVYMNAEQEERAKKANNPQHSITKDEIKQYVKEYVQAAKNSIAAGADGVEIHSANGYLLNQFLDPHSNNRTDEYGGSIENRARFTLEVVDAVVDAIGPEKVGLRLSPYGTFNSMSGGAETCIVAQYAYVLGELERRAKAGKRLAFVHLVEPRVTDPWLVEGEGEYSEGTNDFAYSIWKGPIIRAGNYALHPEAVREQVKDPRTLIGYGRFFISNPDLVYRLEEGLPLNKYDRSTFYTMSAEGYIDYPTYEEAVDLGWNKN

SEQ ID NO: 271 - DNA, 1200 bp, synthetic construct
  misc_feature 1..1200: note = Variant of ERED chimera of Old Yellow Enzyme
  source 1..1200: mol_type = other DNA
atgtctttcaccaaggacttcaagccgcaagcactgcgcgacaccaacctgttcgaacctattaaaattgggaacacacagctggctcatcgcgttgtaatgcctccgctgacccgcatgcgcgctacccatccgggcaacattccgaacaaggagtgggctgcggtttactacggccagcgtgcacagcgtccggggacaatgattatcacggaggcgacgttcatcagcccgcaggcaggtgggtacgataacaagcctggtgtttggtcagacgaacaggttgccgaatggaagaatatcttcctggctattcatgactgtcagtcatttgcgtgggtgcaactgcaggtcctgggctgggccgcctttccggataccctggcgcgtgatgggttacgttacgattctgcctccgataatgtgtatatgaatgcggaacaggaggaacgcgcgaaaaaagctaacaatccgcaacatagcattactaaagacgaaattaaacaatatgtcaaagaatatgttcaggcagctaagaactcgatcgctgcgggtgcggacggcgtggaaattcactcagccaacggttatctgttaaatcagttcctggatccgcacagcaacaatcgcaccgatgagtatgggggctcaattgaaaatcgtgcacgttttactctggaagtcgttgacgcggtggttgatgccatcggcccagaaaaagtgggtttacgtctgagtccgtacggcacgttcaactctatgtcgggcggcgctgaaacgtgtattgttgctcagtatgcctatgtcctgggtgagctggagcgtcgcgccaaggcggggaaacgcctggcgtttgttcatttagtcgaaccacgcgtgacagacccttggctggttgagggggagggcgaatactcggggggcactaacgattttgcttattccatttggaaaggtccgattatccgtgccggcaactatgcactacatcctgaagtagtgcgcgaacaagttaaggaccctcgcaccctgatcggctacggccgcttctttatttcaaatccagacctggtttaccgcttagaagaaggtctgccactgaacaagtatgaccgttctacgttctacaccccaagcgcggagggttacatcgactacccgacctacgaagaagccgtagatctgggctggaacaaaaac

SEQ ID NO: 272 - protein, 400 aa, synthetic construct
  REGION 1..400: note = Variant of ERED chimera of Old Yellow Enzyme
MSFTKDFKPQALRDTNLFEPIKIGNTQLAHRVVMPPLTRMRATHPGNIPNKEWAAVYYGQRAQRPGTMIITEATFISPQAGGYDNKPGVWSDEQVAEWKNIFLAIHDCQSFAWVQLQVLGWAAFPDTLARDGLRYDSASDNVYMNAEQEERAKKANNPQHSITKDEIKQYVKEYVQAAKNSIAAGADGVEIHSANGYLLNQFLDPHSNNRTDEYGGSIENRARFTLEVVDAVVDAIGPEKVGLRLSPYGTFNSMSGGAETCIVAQYAYVLGELERRAKAGKRLAFVHLVEPRVTDPWLVEGEGEYSGGTNDFAYSIWKGPIIRAGNYALHPEVVREQVKDPRTLIGYGRFFISNPDLVYRLEEGLPLNKYDRSTFYTPSAEGYIDYPTYEEAVDLGWNKN

SEQ ID NO: 273 - DNA, 1200 bp, synthetic construct
  misc_feature 1..1200: note = Variant of ERED chimera of Old Yellow Enzyme
  source 1..1200: mol_type = other DNA
atgtctttcgttaaggacttcaagccgcaagcactgcgcgacaccaacctgttcgaacctattaaaattgggaacacacagctggctcatcgcgttgtaatgcctccgctgacccgcatgcgcgctacccatccgggcaacattccgaacaaggagtgggctgcggtttactacggccagcgtgcacagcgtccggggacaatgattatcacggaggcgacgttcatcagcccgcaggcaggtgggtacgataacaagcctggtgtttggtcagacgaacaggttgccgaatggaagaacatcttcctggctattcatgactgtcagtcatttgcgtgggtgcaactgcaggtcctgggctgggccgcctttccggataccctggcgcgtgatgggttacgttacgattctgcctccgataatgtgtatatgaatgcggaacaggaggaaaaagcgaaaaaagctaacaatccgcaacatagcattactaaagacgaaattaaacaatatgtcaaagaatatgttcaggcagctaagaactcgatcgctgcgggtgcggacggcgtggaaattcactcagccaacggttatctgttaaatcagttcctggatccgcacagcaaccgtcgcaccgatgagtatgggggctcaattgaaaatcgtgcacgttttactctggaagtcgttgacgcggtggttgatgccatcggcccagaaaaagtgggtttacgtctgagtccgtacggcacgttcaactctatgtcgggcggcgcggaaacgtgtattgttgctcagtatgcctatgtcctgggtgagctggagcgtcgcgccaaggcggggaaacgcctggcgtttgttcatttagtcgaaccacgcgtgacagacccttggctggttgagggggagggcgaatactcagagggcactaacgattttgcttattccatttggaaaggtccgattatccgtgccggcaactatgcactacatcctgaagccgtgcgcgaacaagttaaggaccctcgcaccctgatcggctacggccgcttctttatttcaaatccagacctggttacgcgcttagaagaaggtctgccactgaacaagtatgaccgttctacgttctacaccatgagcgcggagggttacatcgactacccgacctacgaagaagccgtagatctgggctggaacaaaaac

SEQ ID NO: 274 - protein, 400 aa, synthetic construct
  REGION 1..400: note = Variant of ERED chimera of Old Yellow Enzyme
MSFVKDFKPQALRDTNLFEPIKIGNTQLAHRVVMPPLTRMRATHPGNIPNKEWAAVYYGQRAQRPGTMIITEATFISPQAGGYDNKPGVWSDEQVAEWKNIFLAIHDCQSFAWVQLQVLGWAAFPDTLARDGLRYDSASDNVYMNAEQEEKAKKANNPQHSITKDEIKQYVKEYVQAAKNSIAAGADGVEIHSANGYLLNQFLDPHSNRRTDEYGGSIENRARFTLEVVDAVVDAIGPEKVGLRLSPYGTFNSMSGGAETCIVAQYAYVLGELERRAKAGKRLAFVHLVEPRVTDPWLVEGEGEYSEGTNDFAYSIWKGPIIRAGNYALHPEAVREQVKDPRTLIGYGRFFISNPDLVTRLEEGLPLNKYDRSTFYTMSAEGYIDYPTYEEAVDLGWNKN

SEQ ID NO: 275 - DNA, 1200 bp, synthetic construct
  misc_feature 1..1200: note = Variant of ERED chimera of Old Yellow Enzyme
  source 1..1200: mol_type = other DNA
atgtctttcgtgaaggacttcaagccgcaagcactgcgcgacaccaacctgttcgaacctattaaaattgggaacacacagctggctcatcgcgttgtaatgcctccgctgacccgcatgcgcgctacccatccgggcaacattccgaacaaggagtgggctgcggtttactacggccagcgtgcacagcgtccggggacaatgattatcacggaggcgacgttcatcagcccgcaggcaggtgggtacgataacaagcctggtgtttggtcagacgaacaggttgccgaatggaagaatatcttcctggctattcatgactgtcagtcatttgcgtgggtgcaactgcaggtcctgggctgggccgcctttccggataccctggcgcgtgatgggttacgttacgattctgcctccgataatgtgtatatgaatgcggaacaggaggaaaaagcgaaaaaagctaacaatccgcaacatagcattactaaagacgaaattaaacaatatgtcaaagaatatgttcaggcagctaagaactcgatcgctgcgggtgcggacggcgtggaaattcactcagccaacggttatctgttaaatcagttcctggatccgcacagcaaccgtcgcaccgatgagtatgggggctcaattgaaaatcgtgcacgttttactctggaagtcgttgacgcggtggttgatgccatcggcccagaaaaagtgggtttacgtctgagtccgtacggcacgttcaactctatgtcgggcggcgctgaaacgtgtattgttgctcagtatgcctatgtcctgggtgagctggagcgtcgcgccaaggcggggaaacgcctggcgtttgttcatttagtcgaaccacgcgtgacagacccttggctggttgagggggagggcgaatactcagagggcactaacgattttgcttattccatttggaaaggtccgattatccgtgccggcaactatgcactacatcctgaagtcgtgcgcgaacaagttaaggaccctcgcaccctgatcggctacggccgcttctttatttcaaatccagacctggtttaccgcttagaagaaggtctgccactgaacaagtatgaccgttctacgttctacaccatgagcgcggagggttacatcgactacccgacctacgaagaagccgtagatctgggctggaacaaaaac

SEQ ID NO: 276 - protein, 400 aa, synthetic construct
  REGION 1..400: note = Variant of ERED chimera of Old Yellow Enzyme
MSFVKDFKPQALRDTNLFEPIKIGNTQLAHRVVMPPLTRMRATHPGNIPNKEWAAVYYGQRAQRPGTMIITEATFISPQAGGYDNKPGVWSDEQVAEWKNIFLAIHDCQSFAWVQLQVLGWAAFPDTLARDGLRYDSASDNVYMNAEQEEKAKKANNPQHSITKDEIKQYVKEYVQAAKNSIAAGADGVEIHSANGYLLNQFLDPHSNRRTDEYGGSIENRARFTLEVVDAVVDAIGPEKVGLRLSPYGTFNSMSGGAETCIVAQYAYVLGELERRAKAGKRLAFVHLVEPRVTDPWLVEGEGEYSEGTNDFAYSIWKGPIIRAGNYALHPEVVREQVKDPRTLIGYGRFFISNPDLVYRLEEGLPLNKYDRSTFYTMSAEGYIDYPTYEEAVDLGWNKN

SEQ ID NO: 277 - DNA, 1200 bp, synthetic construct
  misc_feature 1..1200: note = Variant of ERED chimera of Old Yellow Enzyme
  source 1..1200: mol_type = other DNA
atgtctttcgtgaaggacttcaagccgcaagcactgcgcgacaccaacctgttcgaacctattaaaattgggaacacacagctggctcatcgcgttgtaatgcctccgctgacccgcatgcgcgctacccatccgggcaacattccgaacaaggagtgggctgcggtttactacggccagcgtgcacagcgtccggggacaatgattatcacggaggcgacgttcatcagcccgcaggcaggtgggtacgataacaagcctggtgtttggtcagacgaacaggttgccgaatggaaggagatcttcctggctattcatgactgtcagtcatttgcgtgggtgcaactgcaggtcctgggctgggccgcctttccggataccctggcgcgtgatgggttacgttacgattctgcctccgataatgtgtatatgaatgcggaacaggaggaaaaagcgaaaaaagctaacaatccgcaacatagcattactaaagacgaaattaaacaatatgtcaaagaatatgttcaggcagctaagaactcgatcgctgcgggtgcggacggcgtggaaattcactcagccaacggttatctgttaaatcagttcctggatccgcacagcaaccgtcgcaccgatgagtatgggggctcaattgaaaatcgtgcacgttttactctggaagtcgttgacgcggtggttgatgccatcggcccagaaaaagtgggtttacgtctgagtccgtacggcacgttcaactctatgtcgggcggcaaagaaacgtgtattgttgctcagtatgcctatgtcctgggtgagctggagcgtcgcgccaaggcggggaaacgcctggcgtttgttcatttagtcgaaccacgcgtgacagacccttggctggttgagggggagggcgaatactcagagggcactaacgattttgcttattccatttggaaaggtccgattatccgtgccggcaactatgcactacatcctgaagtcgtgcgcgaacaagttaaggaccctcgcaccctgatcggctacggccgcttctttatttcaaatccagacctggttacgcgcttagaagaaggtctgccactgaacaagtatgaccgttctacgttctacaccatgagcgcggagggttacatcgactacccgacctacgaagaagccgtagatctgggctggaacaaaaac

SEQ ID NO: 278 - protein, 400 aa, synthetic construct
  REGION 1..400: note = Variant of ERED chimera of Old Yellow Enzyme
MSFVKDFKPQALRDTNLFEPIKIGNTQLAHRVVMPPLTRMRATHPGNIPNKEWAAVYYGQRAQRPGTMIITEATFISPQAGGYDNKPGVWSDEQVAEWKEIFLAIHDCQSFAWVQLQVLGWAAFPDTLARDGLRYDSASDNVYMNAEQEEKAKKANNPQHSITKDEIKQYVKEYVQAAKNSIAAGADGVEIHSANGYLLNQFLDPHSNRRTDEYGGSIENRARFTLEVVDAVVDAIGPEKVGLRLSPYGTFNSMSGGKETCIVAQYAYVLGELERRAKAGKRLAFVHLVEPRVTDPWLVEGEGEYSEGTNDFAYSIWKGPIIRAGNYALHPEVVREQVKDPRTLIGYGRFFISNPDLVTRLEEGLPLNKYDRSTFYTMSAEGYIDYPTYEEAVDLGWNKN

SEQ ID NO: 279 - DNA, 1200 bp, synthetic construct
  misc_feature 1..1200: note = Variant of ERED chimera of Old Yellow Enzyme
  source 1..1200: mol_type = other DNA
atgtctttcaccaaggacttcaagccgcaagcactgcgcgacaccaacctgttcgaacctattaaaattgggaacacacagctggctcatcgcgttgtaatgcctccgctgacccgcatgcgcgctacccatccgggcaacattccgaacaaggagtgggctgcggtttactacggccagcgtgcacagcgtccggggacaatgattatcacggaggcgacgttcatcagcccgcaggcaggtgggtacgataacaagcctggtgtttggtcagacgaacaggttgccgaatggaagaacatcttcctggctattcatgactgtcagtcatttgcgtgggtgcaactgcaggtcctgggctgggccgcctttccggataccctggcgcgtgatgggttacgttacgattctgcctccgataatgtgtatatgaatgcggaacaggaggaacgcgcgaaaaaagctaacaatccgcaacatagcattactaaagacgaaattaaacaatatgtcaaagaatatgttcaggcagctaagaactcgatcgctgcgggtgcggacggcgtggaaattcactcagccaacggttatctgttaaatcagttcctggatccgcacagcaacaaccgcaccgatgagtatgggggctcaattgaaaatcgtgcacgttttactctggaagtcgttgacgcggtggttgatgccatcggcccagaaaaagtgggtttacgtctgagtccgtacggcacgttcaactctatgtcgggcggcgcggaaacgtgtattgttgctcagtatgcctatgtcctgggtgagctggagcgtcgcgccaaggcggggaaacgcctggcgtttgttcatttagtcgaaccacgcgtgacagacccttggctggttgagggggagggcgaatactcagagggcactaacgattttgcttattccatttggaaaggtccgattatccgtgccggcaactatgcactacatcctgaagtcgtgcgcgaacaagttaaggaccctcgcaccctgatcggctacggccgcttctttatttcaaatccagacctggttgaacgcttagaagaaggtctgccactgaacaagtatgaccgttctacgttctacacccaaagcgcggagggttacatcgactacccgacctacgaagaagccgtagatctgggctggaacaaaaac

SEQ ID NO: 280 - protein, 400 aa, synthetic construct
  REGION 1..400: note = Variant of ERED chimera of Old Yellow Enzyme
MSFTKDFKPQALRDTNLFEPIKIGNTQLAHRVVMPPLTRMRATHPGNIPNKEWAAVYYGQRAQRPGTMIITEATFISPQAGGYDNKPGVWSDEQVAEWKNIFLAIHDCQSFAWVQLQVLGWAAFPDTLARDGLRYDSASDNVYMNAEQEERAKKANNPQHSITKDEIKQYVKEYVQAAKNSIAAGADGVEIHSANGYLLNQFLDPHSNNRTDEYGGSIENRARFTLEVVDAVVDAIGPEKVGLRLSPYGTFNSMSGGAETCIVAQYAYVLGELERRAKAGKRLAFVHLVEPRVTDPWLVEGEGEYSEGTNDFAYSIWKGPIIRAGNYALHPEVVREQVKDPRTLIGYGRFFISNPDLVERLEEGLPLNKYDRSTFYTQSAEGYIDYPTYEEAVDLGWNKN

SEQ ID NO: 281 - DNA, 1200 bp, synthetic construct
  misc_feature 1..1200: note = Variant of ERED chimera of Old Yellow Enzyme
  source 1..1200: mol_type = other DNA
atgtctttcaccaaggacttcaagccgcaagcactgcgcgacaccaacctgttcgaacctattaaaattgggaacacacagctggctcatcgcgttgtaatgcctccgctgacccgcatgcgcgctacccatccgggcaacattccgaacaaggagtgggctgcggtttactacggccagcgtgcacagcgtccggggacaatgattatcacggaggcgacgttcatcagcccgcaggcaggtgggtacgataacaagcctggtgtttggtcagacgaacaggttgccgaatggaaggagatcttcctggctattcatgactgtcagtcatttgcgtgggtgcaactgcaggtcctgggctgggccgcctttccggataccctggcgcgtgatgggttacgttacgattctgcctccgataatgtgtatatgaatgcggaacaggaggaaaaagcgaaaaaagctaacaatccgcaacatagcattactaaagacgaaattaaacaatatgtcaaagaatatgttcaggcagctaagaactcgatcgctgcgggtgcggacggcgtggaaattcactcagccaacggttatctgttaaatcagttcctggatccgcacagcaaccgtcgcaccgatgagtatgggggctcaattgaaaatcgtgcacgttttactctggaagtcgttgacgcggtggttgatgccatcggcccagaaaaagtgggtttacgtctgagtccgtacggcacgttcaactctatgtcgggcggcaaagaaacgtgtattgttgctcagtatgcctatgtcctgggtgagctggagcgtcgcgccaaggcggggaaacgcctggcgtttgttcatttagtcgaaccacgcgtgacagacccttggctggttgagggggagggcgaatactcagagggcactaacgattttgcttattccatttggaaaggtccgattatccgtgccggcaactatgcactacatcctgaagtcgtgcgcgaacaagttaaggaccctcgcaccctgatcggctacggccgcttctttatttcaaatccagacctggttacgcgcttagaagaaggtctgccactgaacaagtatgaccgttctacgttctacacccaaagcgcggagggttacatcgactacccgacctacgaagaagccgtagatctgggctggaacaaaaac

SEQ ID NO: 282 - protein, 400 aa, synthetic construct
  REGION 1..400: note = Variant of ERED chimera of Old Yellow Enzyme
MSFTKDFKPQALRDTNLFEPIKIGNTQLAHRVVMPPLTRMRATHPGNIPNKEWAAVYYGQRAQRPGTMIITEATFISPQAGGYDNKPGVWSDEQVAEWKEIFLAIHDCQSFAWVQLQVLGWAAFPDTLARDGLRYDSASDNVYMNAEQEEKAKKANNPQHSITKDEIKQYVKEYVQAAKNSIAAGADGVEIHSANGYLLNQFLDPHSNRRTDEYGGSIENRARFTLEVVDAVVDAIGPEKVGLRLSPYGTFNSMSGGKETCIVAQYAYVLGELERRAKAGKRLAFVHLVEPRVTDPWLVEGEGEYSEGTNDFAYSIWKGPIIRAGNYALHPEVVREQVKDPRTLIGYGRFFISNPDLVTRLEEGLPLNKYDRSTFYTQSAEGYIDYPTYEEAVDLGWNKN

SEQ ID NO: 283 - DNA, 1200 bp, synthetic construct
  misc_feature 1..1200: note = Variant of ERED chimera of Old Yellow Enzyme
  source 1..1200: mol_type = other DNA
atgtctttcgtgaaggacttcaagccgcaagcactgcgcgacaccaacctgttcgaacctattaaaattgggaacacacagctggctcatcgcgttgtaatgcctccgctgacccgcatgcgcgctacccatccgggcaacattccgaacaaggagtgggctgcggtttactacggccagcgtgcacagcgtccggggacaatgattatcacggaggcgacgttcatcagcccgcaggcaggtgggtacgataacaagcctggtgtttggtcagacgaacaggttgccgaatggaagaatatcttcctggctattcatgactgtcagtcatttgcgtgggtgcaactgcaggtcctgggctgggccgcctttccggataccctggcgcgtgatgggttacgttacgattctgcctccgataatgtgtatatgaatccggaacaggaggaacgcgcgaaaaaagctaacaatccgcaacatagcattactaaagacgaaattaaacaatatgtcaaagaatatgttcaggcagctaagaactcgatcgctgcgggtgcggacggcgtggaaattcactcagccaacggttatctgttaaatcagttcctggatccgcacagcaacaatcgcaccgatgagtatgggggctcaattgaaaatcgtgcacgttttactctggaagtcgttgacgcggtggttgatgccatcggcccagaaaaagtgggtttacgtctgagtccgtacggcacgttcaactctatgtcgggcggcgcggaaacgtgtattgttgctcagtatgcctatgtcctgggtgagctggagcgtcgcgccaaggcggggaaacgcctggcgtttgttcatttagtcgaaccacgcgtgacagacccttggctggttgagggggagggcgaatactcagagggcactaacgattttgcttattccatttggaaaggtccgattatccgtgccggcaactatgcactacatcctgaagtagtgcgcgaacaagttaaggaccctcgcaccctgatcggctacggccgcttctttatttcaaatccagacctggttacgcgcttagaagaaggtctgccactgaacaagtatgaccgttctacgttctacaccccaagcgcggagggttacatcgactacccgacctacgaagaagccgtagatctgggctggaacaaaaac

SEQ ID NO: 284 - protein, 400 aa, synthetic construct
  REGION 1..400: note = Variant of ERED chimera of Old Yellow Enzyme
MSFVKDFKPQALRDTNLFEPIKIGNTQLAHRVVMPPLTRMRATHPGNIPNKEWAAVYYGQRAQRPGTMIITEATFISPQAGGYDNKPGVWSDEQVAEWKNIFLAIHDCQSFAWVQLQVLGWAAFPDTLARDGLRYDSASDNVYMNPEQEERAKKANNPQHSITKDEIKQYVKEYVQAAKNSIAAGADGVEIHSANGYLLNQFLDPHSNNRTDEYGGSIENRARFTLEVVDAVVDAIGPEKVGLRLSPYGTFNSMSGGAETCIVAQYAYVLGELERRAKAGKRLAFVHLVEPRVTDPWLVEGEGEYSEGTNDFAYSIWKGPIIRAGNYALHPEVVREQVKDPRTLIGYGRFFISNPDLVTRLEEGLPLNKYDRSTFYTPSAEGYIDYPTYEEAVDLGWNKN

SEQ ID NO: 285 - DNA, 1200 bp, synthetic construct
  misc_feature 1..1200: note = Variant of ERED chimera of Old Yellow Enzyme
  source 1..1200: mol_type = other DNA
atgtctttcaccaaggacttcaagccgcaagcactgcgcgacaccaacctgttcgaacctattaaaattgggaacacacagctggctcatcgcgttgtaatgcctccgctgacccgcatgcgcgctacccatccgggcaacattccgaacaaggagtgggctgcggtttactacggccagcgtgcacagcgtccggggacaatgattatcacggaggcgacgttcatcagcccgcaggcaggtgggtacgataacaagcctggtgtttggtcagacgaacaggttgccgaatggaagaacatcttcctggctattcatgactgtcagtcatttgcgtgggtgcaactgcaggtcctgggctgggccgcctttccggataccctggcgcgtgatgggttacgttacgattctgcctccgataatgtgtatatgaatgcggaacaggaggaaaaagcgaaaaaagctaacaatccgcaacatagcattactaaagacgaaattaaacaatatgtcaaagaatatgttcaggcagctaagaactcgatcgctgcgggtgcggacggcgtggaaattcactcagccaacggttatctgttaaatcagttcctggatccgcacagcaaccgtcgcaccgatgagtatgggggctcaattgaaaatcgtgcacgttttactctggaagtcgttgacgcggtggttgatgccatcggcccagaaaaagtgggtttacgtctgagtccgtacggcacgttcaactctatgtcgggcggcgctgaaacgtgtattgttgctcagtatgcctatgtcctgggtgagctggagcgtcgcgccaaggcggggaaacgcctggcgtttgttcatttagtcgaaccacgcgtgacagacccttggctggttgagggggagggcgaatactcagagggcactaacgattttgcttattccatttggaaaggtccgattatccgtgccggcaactatgcactacatcctgaagtcgtgcgcgaacaagttaaggaccctcgcaccctgatcggctacggccgcttctttatttcaaatccagacctggttacgcgcttagaagaaggtctgccactgaacaagtatgaccgttctacgttctacaccatgagcgcggagggttacatcgactacccgacctacgaagaagccgtagatctgggctggaacaaaaac

SEQ ID NO: 286 - protein, 400 aa, synthetic construct
  REGION 1..400: note = Variant of ERED chimera of Old Yellow Enzyme
MSFTKDFKPQALRDTNLFEPIKIGNTQLAHRVVMPPLTRMRATHPGNIPNKEWAAVYYGQRAQRPGTMIITEATFISPQAGGYDNKPGVWSDEQVAEWKNIFLAIHDCQSFAWVQLQVLGWAAFPDTLARDGLRYDSASDNVYMNAEQEEKAKKANNPQHSITKDEIKQYVKEYVQAAKNSIAAGADGVEIHSANGYLLNQFLDPHSNRRTDEYGGSIENRARFTLEVVDAVVDAIGPEKVGLRLSPYGTFNSMSGGAETCIVAQYAYVLGELERRAKAGKRLAFVHLVEPRVTDPWLVEGEGEYSEGTNDFAYSIWKGPIIRAGNYALHPEVVREQVKDPRTLIGYGRFFISNPDLVTRLEEGLPLNKYDRSTFYTMSAEGYIDYPTYEEAVDLGWNKN

SEQ ID NO: 287 - DNA, 1200 bp, synthetic construct
  misc_feature 1..1200: note = Variant of ERED chimera of Old Yellow Enzyme
  source 1..1200: mol_type = other DNA
atgtctttcgtgaaggacttcaagccgcaagcactgcgcgacaccaacctgttcgaacctattaaaattgggaacacacagctggctcatcgcgttgtaatgcctccgctgacccgcatgcgcgctacccatccgggcaacattccgaacaaggagtgggctgcggtttactacggccagcgtgcacagcgtccggggacaatgattatcacggaggcgacgttcatcagcccgcaggcaggtgggtacgataacaagcctggtgtttggtcagacgaacaggttgccgaatggaagaatatcttcctggctattcatgactgtcagtcatttgcgtgggtgcaactgcaggtcctgggctgggccgcctttccggataccctggcgcgtgatgggttacgttacgattctgcctccgataatgtgtatatgaatgcggaacaggaggaaaaagcgaaaaaagctaacaatccgcaacatagcattactaaagacgaaattaaacaatatgtcaaagaatatgttcaggcagctaagaactcgatcgctgcgggtgcggacggcgtggaaattcactcagccaacggttatctgttaaatcagttcctggatccgcacagcaacaaccgcaccgatgagtatgggggctcaattgaaaatcgtgcacgttttactctggaagtcgttgacgcggtggttgatgccatcggcccagaaaaagtgggtttacgtctgagtccgtacggcacgttcaactctatgtcgggcggcgctgaaacgtgtattgttgctcagtatgcctatgtcctgggtgagctggagcgtcgcgccaaggcggggaaacgcctggcgtttgttcatttagtcgaaccacgcgtgacagacccttggctggttgagggggagggcgaatactcagagggcactaacgattttgcttattccatttggaaaggtccgattatccgtgccggcaactatgcactacatcctgaagtagtgcgcgaacaagttaaggaccctcgcaccctgatcggctacggccgcttctttatttcaaatccagacctggtttaccgcttagaagaaggtctgccactgaacaagtatgaccgttctacgttctacaccccaagcgcggagggttacatcgactacccgacctacgaagaagccgtagatctgggctggaacaaaaac

SEQ ID NO: 288 - protein, 400 aa, synthetic construct
  REGION 1..400: note = Variant of ERED chimera of Old Yellow Enzyme
MSFVKDFKPQALRDTNLFEPIKIGNTQLAHRVVMPPLTRMRATHPGNIPNKEWAAVYYGQRAQRPGTMIITEATFISPQAGGYDNKPGVWSDEQVAEWKNIFLAIHDCQSFAWVQLQVLGWAAFPDTLARDGLRYDSASDNVYMNAEQEEKAKKANNPQHSITKDEIKQYVKEYVQAAKNSIAAGADGVEIHSANGYLLNQFLDPHSNNRTDEYGGSIENRARFTLEVVDAVVDAIGPEKVGLRLSPYGTFNSMSGGAETCIVAQYAYVLGELERRAKAGKRLAFVHLVEPRVTDPWLVEGEGEYSEGTNDFAYSIWKGPIIRAGNYALHPEVVREQVKDPRTLIGYGRFFISNPDLVYRLEEGLPLNKYDRSTFYTPSAEGYIDYPTYEEAVDLGWNKN

SEQ ID NO: 289 - DNA, 1200 bp, synthetic construct
  misc_feature 1..1200: note = Variant of ERED chimera of Old Yellow Enzyme
  source 1..1200: mol_type = other DNA
atgtctttcgtgaaggacttcaagccgcaagcactgcgcgacaccaacctgttcgaacctattaaaattgggaacacacagctggctcatcgcgttgtaatgcctccgctgacccgcatgcgcgctacccatccgggcaacattccgaacaaggagtgggctgcggtttactacggccagcgtgcacagcgtccggggacaatgattatcacggaggcgacgttcatcagcccgcaggcaggtgggtacgataacaagcctggtgtttggtcagacgaacaggttgccgaatggaagaacatcttcctggctattcatgactgtcagtcatttgcgtgggtgcaactgcaggtcctgggctgggccgcctttccggataccctggcgcgtgatgggttacgttacgattctgcctccgataatgtgtatatgaatgcggaacaggaggaaaaagcgaaaaaagctaacaatccgcaacatagcattactaaagacgaaattaaacaatatgtcaaagaatatgttcaggcagctaagaactcgatcgctgcgggtgcggacggcgtggaaattcactcagccaacggttatctgttaaatcagttcctggatccgcacagcaaccgtcgcaccgatgagtatgggggctcaattgaaaatcgtgcacgttttactctggaagtcgttgacgcggtggttgatgccatcggcccagaaaaagtgggtttacgtctgagtccgtacggcacgttcaactctatgtcgggcggcgcggaaacgtgtattgttgctcagtatgcctatgtcctgggtgagctggagcgtcgcgccaaggcggggaaacgcctggcgtttgttcatttagtcgaaccacgcgtgactgacccttggaaagttgagggggagggcgaatactcagagggcactaacgattttgcttattccatttggaaaggtccgattatccgtgccggcaactatgcactacatcctgaagtagtgcgcgaacaagttaaggaccctcgcaccctgatcggctacggccgcttctttatttcaaatccagacctggttgaacgcttagaagaaggtctgccactgaacaagtatgaccgttctacgttctacaccccaagcgcggagggttacatcgactacccgacctacgaagaagccgtagatctgggctggaacaaaaac

SEQ ID NO: 290 - protein, 400 aa, synthetic construct
  REGION 1..400: note = Variant of ERED chimera of Old Yellow Enzyme
MSFVKDFKPQALRDTNLFEPIKIGNTQLAHRVVMPPLTRMRATHPGNIPNKEWAAVYYGQRAQRPGTMIITEATFISPQAGGYDNKPGVWSDEQVAEWKNIFLAIHDCQSFAWVQLQVLGWAAFPDTLARDGLRYDSASDNVYMNAEQEEKAKKANNPQHSITKDEIKQYVKEYVQAAKNSIAAGADGVEIHSANGYLLNQFLDPHSNRRTDEYGGSIENRARFTLEVVDAVVDAIGPEKVGLRLSPYGTFNSMSGGAETCIVAQYAYVLGELERRAKAGKRLAFVHLVEPRVTDPWKVEGEGEYSEGTNDFAYSIWKGPIIRAGNYALHPEVVREQVKDPRTLIGYGRFFISNPDLVERLEEGLPLNKYDRSTFYTPSAEGYIDYPTYEEAVDLGWNKN

SEQ ID NO: 291 - DNA, 1200 bp, synthetic construct
  misc_feature 1..1200: note = Variant of ERED chimera of Old Yellow Enzyme
  source 1..1200: mol_type = other DNA
atgtctttcgtgaaggacttcaagccgcaagcactgcgcgacaccaacctgttcgaacctattaaaattgggaacacacagctggctcatcgcgttgtaatgcctccgctgacccgcatgcgcgctacccatccgggcaacattccgaacaaggagtgggctgcggtttactacggccagcgtgcacagcgtccggggacaatgattatcacggaggcgacgttcatcagcccgcaggcaggtgggtacgataacaagcctggtgtttggtcagacgaacaggttgccgaatggaaggagatcttcctggctattcatgactgtcagtcatttgcgtgggtgcaactgcaggtcctgggctgggccgcctttccggataccctggcgcgtgatgggttacgttacgattctgcctccgataatgtgtatatgaatccggaacaggaggaacgcgcgaaaaaagctaacaatccgcaacatagcattactaaagacgaaattaaacaatatgtcaaagaatatgttcaggcagctaagaactcgatcgctgcgggtgcggacggcgtggaaattcactcagccaacggttatctgttaaatcagttcctggatccgcacagcaacaatcgcaccgatgagtatgggggctcaattgaaaatcgtgcacgttttactctggaagtcgttgacgcggtggttgatgccatcggcccagaaaaagtgggtttacgtctgagtccgtacggcacgttcaactctatgtcgggcggcaaagaaacgtgtattgttgctcagtatgcctatgtcctgggtgagctggagcgtcgcgccaaggcggggaaacgcctggcgtttgttcatttagtcgaaccacgcgtgacagacccttggctggttgagggggagggcgaatactcggagggcactaacgattttgcttattccatttggaaaggtccgattatccgtgccggcaactatgcactacatcctgaagtagtgcgcgaacaagttaaggaccctcgcaccctgatcggctacggccgcttctttatttcaaatccagacctggttgaacgcttagaagaaggtctgccactgaacaagtatgaccgttctacgttctacacccaaagcgcggagggttacatcgactacccgacctacgaagaagccgtagatctgggctggaacaaaaac

SEQ ID NO: 292 - protein, 400 aa, synthetic construct
  REGION 1..400: note = Variant of ERED chimera of Old Yellow Enzyme
MSFVKDFKPQALRDTNLFEPIKIGNTQLAHRVVMPPLTRMRATHPGNIPNKEWAAVYYGQRAQRPGTMIITEATFISPQAGGYDNKPGVWSDEQVAEWKEIFLAIHDCQSFAWVQLQVLGWAAFPDTLARDGLRYDSASDNVYMNPEQEERAKKANNPQHSITKDEIKQYVKEYVQAAKNSIAAGADGVEIHSANGYLLNQFLDPHSNNRTDEYGGSIENRARFTLEVVDAVVDAIGPEKVGLRLSPYGTFNSMSGGKETCIVAQYAYVLGELERRAKAGKRLAFVHLVEPRVTDPWLVEGEGEYSEGTNDFAYSIWKGPIIRAGNYALHPEVVREQVKDPRTLIGYGRFFISNPDLVERLEEGLPLNKYDRSTFYTQSAEGYIDYPTYEEAVDLGWNKN

SEQ ID NO: 293 - DNA, 1200 bp, synthetic construct
  misc_feature 1..1200: note = Variant of ERED chimera of Old Yellow Enzyme
  source 1..1200: mol_type = other DNA
atgtctttcgttaaggactttaagccgcaagcactgcgcgacaccaacctgttcgaacctattaaaattgggaacacacagctggctcatcgcgttgtaatgcctccgctgacccgcatgcgcgctacccatccgggcaacattccgaacaaggagtgggctgcggtttactacggccagcgtgcacagcgtccggggacaatgattatcacggaggcgacgttcatcagcccgcaggcaggtgggtacgataacaagcctggtgtttggtcagacgaacaggtcgccgaatggaagaaaatcttcctggctattcatgactgtcagtcatttgcgtgggtgcaactgcaggtcctgggctgggccgcctttccggataccctggcgcgtgatgggttacgttacgattctgcctccgataatgtgtatatgaatgcggaacaggaggaaaaagcgaaaaaagctaacaatccgcaacatagcattactaaagacgaaattaaacaatatgtcaaagaatatgttcaggcagctaagaactcgatcgctgcgggtgcggacggcgtggaaattcactcagccaacggttatctgttaaatcagttcctggatccgcacagcaacaaccgcaccgatgagtatgggggctcaattgaaaatcgtgcacgttttactctggaagtcgttgacgcggtggttgatgccatcggcccagaaaaagtgggtttacgtctgagtccgtacggcacgttcaactctatgtcgggcggcgcggaaacgtgtattgttgctcagtatgcctatgtcctgggtgagctggagcgtcgcgccaaggcggggaaacgcctggcgtttgttcatttagtcgaaccacgcgtgacagacccttggctggttgagggggagggcgaatactcagagggcactaacgattttgcttattccatttggaaaggtccgattatccgtgccggcaactatgcactacatcctgaagtagtgcgcgaacaagttaaggaccctcgcaccctgatcggctacggccgcttctttatttcaaatccagacctggtttaccgcttagaagaaggtctgccactgaacaagtatgaccgttctacgttctacaccgggagcgcggagggttacatcgactacccgacctacgaagaagccgtagatctgggctggaacaaaaac

SEQ ID NO: 294 - protein, 400 aa, synthetic construct
  REGION 1..400: note = Variant of ERED chimera of Old Yellow Enzyme
MSFVKDFKPQALRDTNLFEPIKIGNTQLAHRVVMPPLTRMRATHPGNIPNKEWAAVYYGQRAQRPGTMIITEATFISPQAGGYDNKPGVWSDEQVAEWKKIFLAIHDCQSFAWVQLQVLGWAAFPDTLARDGLRYDSASDNVYMNAEQEEKAKKANNPQHSITKDEIKQYVKEYVQAAKNSIAAGADGVEIHSANGYLLNQFLDPHSNNRTDEYGGSIENRARFTLEVVDAVVDAIGPEKVGLRLSPYGTFNSMSGGAETCIVAQYAYVLGELERRAKAGKRLAFVHLVEPRVTDPWLVEGEGEYSEGTNDFAYSIWKGPIIRAGNYALHPEVVREQVKDPRTLIGYGRFFISNPDLVYRLEEGLPLNKYDRSTFYTGSAEGYIDYPTYEEAVDLGWNKN

SEQ ID NO: 295 - DNA, 1200 bp, synthetic construct
  misc_feature 1..1200: note = Variant of ERED chimera of Old Yellow Enzyme
  source 1..1200: mol_type = other DNA
atgtctttcgttaaggacttcaagccgcaagcactgcgcgacaccaacctgttcgaacctattaaaattgggaacacacagctggctcatcgcgttgtaatgcctccgctgacccgcatgcgcgctacccatccgggcaacattccgaacaaggagtgggctgcggtttactacggccagcgtgcacagcgtccggggacaatgattatcacggaggcgacgttcatcagcccgcaggcaggtgggtacgataacaagcctggtgtttggtcagacgaacaggttgccgaatggaagaacatcttcctggctattcatgactgtcagtcatttgcgtgggtgcaactgcaggtcctgggctgggccgcctttccggataccctggcgcgtgatgggttacgttacgattctgcctccgataatgtgtatatgaatgcggaacaggaggaaaaagcgaaaaaagctaacaatccgcaacatagcattactaaagacgaaattaaacaatatgtcaaagaatatgttcaggcagctaagaactcgatcgctgcgggtgcggacggcgtggaaattcactcagccaacggttatctgttaaatcagttcctggatccgcacagcaacaaccgcaccgatgagtatgggggctcaattgaaaatcgtgcacgttttactctggaagtcgttgacgcggtggttgatgccatcggcccagaaaaagtgggtttacgtctgagtccgtacggcacgttcaactctatgtcgggcggcgcggaaacgtgtattgttgctcagtatgcctatgtcctgggtgagctggagcgtcgcgccaaggcggggaaacgcctggcgtttgttcatttagtcgaaccacgcgtgacagacccttggctggttgagggggagggcgaatactcagagggcactaacgattttgcttattccatttggaaaggtccgattatccgtgccggcaactatgcactacatcctgaagtagtgcgcgagcaagttaaggacccgcgcaccctgatcggctacggccgcttctttatttcaaatccagacctggtttaccgcttagaagaaggtctgccactgaacaagtatgaccgttctacgttctacaccgagagcgcggagggttacatcgactacccgacctacgaagaagccgtagatctgggctggaacaaaaac

SEQ ID NO: 296 - protein, 400 aa, synthetic construct
  REGION 1..400: note = Variant of ERED chimera of Old Yellow Enzyme
MSFVKDFKPQALRDTNLFEPIKIGNTQLAHRVVMPPLTRMRATHPGNIPNKEWAAVYYGQRAQRPGTMIITEATFISPQAGGYDNKPGVWSDEQVAEWKNIFLAIHDCQSFAWVQLQVLGWAAFPDTLARDGLRYDSASDNVYMNAEQEEKAKKANNPQHSITKDEIKQYVKEYVQAAKNSIAAGADGVEIHSANGYLLNQFLDPHSNNRTDEYGGSIENRARFTLEVVDAVVDAIGPEKVGLRLSPYGTFNSMSGGAETCIVAQYAYVLGELERRAKAGKRLAFVHLVEPRVTDPWLVEGEGEYSEGTNDFAYSIWKGPIIRAGNYALHPEVVREQVKDPRTLIGYGRFFISNPDLVYRLEEGLPLNKYDRSTFYTESAEGYIDYPTYEEAVDLGWNKN

SEQ ID NO: 297 - DNA, 1200 bp, synthetic construct
  misc_feature 1..1200: note = Variant of ERED chimera of Old Yellow Enzyme
  source 1..1200: mol_type = other DNA
atgtctttcgtgaaggacgggaagccgcaagcactgcgcgacaccaacctgttcgaacctattaaaattgggaacacacagctggctcatcgcgttgtaatgcctccgctgacccgcatgcgcgctacccatccgggcaacattccgaacaaggagtgggctgcggtttactacggccagcgtgcacagcgtccggggacaatgattatcacggaggcgacgttcatcagcccgcaggcaggtgggtacgataacaagcctggtgtttggtcagacgaacagatcgccgaatggaagaaaatcttcctggctattcatgactgtcagtcatttgcgtgggtgcaactgcaggtcctgggctgggccgcctttccggataccctggcgcgtgatgggttacgttacgattctgcctccgataatgtgtatatgaatgcggaacaggaggaaaaagcgaaaaaagctaacaatccgcaacatagcattactaaagacgaaattaaacaatatgtcaaagaatatgttcaggcagctaagaactcgatcgctgcgggtgcggacggcgtggaaattcactcagccaacggttatctgttaaatcagttcctggatccgcacagcaacaaccgcaccgatgagtatgggggctcaattgaaaatcgtgcacgttttactctggaagtcgttgacgcggtggttgatgccatcggcccagaaaaagtgggtttacgtctgagtccgtacggcacgttcaactctatgtcgggcggcgcggaaacgtgtattgttgctcagtatgcctatgtcctgggtgagctggagcgtcgcgccaaggcggggaaacgcctggcgtttgttcatttagtcgaaccacgcgtgacggacccttggctggtcgagggggaaggcgaatactcagagggcactaacgattttgcttattccatttggaaaggtccgattatccgtgccggcaactatgcactacatcctgaagtagtgcgcgaacaagttaaggaccctcgcaccctgatcggctacggccgcttctttatttcaaatccagacctggtttaccgcttagaagaaggtctgccactgaacaagtatgaccgttctacgttctacaccatgagcgcggagggttacatcgactacccgacctacgaagaagccgtagatctgggctggaacaaaaac

SEQ ID NO: 298 - protein, 400 aa, synthetic construct
  REGION 1..400: note = Variant of ERED chimera of Old Yellow Enzyme
MSFVKDGKPQALRDTNLFEPIKIGNTQLAHRVVMPPLTRMRATHPGNIPNKEWAAVYYGQRAQRPGTMIITEATFISPQAGGYDNKPGVWSDEQIAEWKKIFLAIHDCQSFAWVQLQVLGWAAFPDTLARDGLRYDSASDNVYMNAEQEEKAKKANNPQHSITKDEIKQYVKEYVQAAKNSIAAGADGVEIHSANGYLLNQFLDPHSNNRTDEYGGSIENRARFTLEVVDAVVDAIGPEKVGLRLSPYGTFNSMSGGAETCIVAQYAYVLGELERRAKAGKRLAFVHLVEPRVTDPWLVEGEGEYSEGTNDFAYSIWKGPIIRAGNYALHPEVVREQVKDPRTLIGYGRFFISNPDLVYRLEEGLPLNKYDRSTFYTMSAEGYIDYPTYEEAVDLGWNKN

SEQ ID NO: 299 - DNA, 1200 bp, synthetic construct
  misc_feature 1..1200: note = Variant of ERED chimera of Old Yellow Enzyme
  source 1..1200: mol_type = other DNA
atgtctttcgttaaggacttcaagccgcaagcactgcgcgacaccaacctgttcgaacctattaaaattgggaacacacagctggctcatcgcgttgtaatgcctccgctgacccgcatgcgcgctacccatccgggcaacattccgaacaaggagtgggctgcggtttactacggccagcgtgcacagcgtccggggacaatgattatcacggaggcgacgttcatcagcccgcaggcaggtgggtacgataacaagcctggtgtttggtcagacgaacaggttgccgaatggaagaacatcttcctggctattcatgactgtcagtcatttgcgtgggtgcaactgcaggtcctgggctgggccgcctttccggataccctggcgcgtgatgggttacgttacgattctgcctccgataatgtgtatatgaatgcggaacaggaggaaaaagcgaaaaaagctaacaatccgcaacatagcattactaaagacgaaattaaacaatatgtcaaagaatatgttcaggcagctaagaactcgatcgctgcgggtgcggacggcgtggaaattcactcagccaacggttatctgttaaatcagttcctggatccgcacagcaacaaccgcaccgatgagtatgggggctcaattgaaaatcgtgcacgttttactctggaagtcgttgacgcggtggttgatgccatcggcccagaaaaagtgggtttacgtctgagtccgtacggcacgttcaactctatgtcgggcggccgcgaaacgtgtattgttgctcagtatgcctatgtcctgggtgagctggagcgtcgcgccaaggcggggaaacgcctggcgtttgttcatttagtcgaaccacgcgtgacagacccttggctggttgagggggagggcgaatactcagagggcactaacgattttgcttattccatttggaaaggtccgattatccgtgccggcaactatgcactacatcctgaagtagtgcgcgaacaagttaaggaccctcgcaccctgatcggctacggccgcttctttatttcaaatccagacctggtttaccgcttagaagaaggtctgccactgaacaagtatgaccgttctacgttctacaccgggagcgcggagggttacatcgactacccgacctacgaagaagccgtagatctgggctggaacaaaaac

SEQ ID NO: 300 - protein, 400 aa, synthetic construct
  REGION 1..400: note = Variant of ERED chimera of Old Yellow Enzyme
MSFVKDFKPQALRDTNLFEPIKIGNTQLAHRVVMPPLTRMRATHPGNIPNKEWAAVYYGQRAQRPGTMIITEATFISPQAGGYDNKPGVWSDEQVAEWKNIFLAIHDCQSFAWVQLQVLGWAAFPDTLARDGLRYDSASDNVYMNAEQEEKAKKANNPQHSITKDEIKQYVKEYVQAAKNSIAAGADGVEIHSANGYLLNQFLDPHSNNRTDEYGGSIENRARFTLEVVDAVVDAIGPEKVGLRLSPYGTFNSMSGGRETCIVAQYAYVLGELERRAKAGKRLAFVHLVEPRVTDPWLVEGEGEYSEGTNDFAYSIWKGPIIRAGNYALHPEVVREQVKDPRTLIGYGRFFISNPDLVYRLEEGLPLNKYDRSTFYTGSAEGYIDYPTYEEAVDLGWNKN

SEQ ID NO: 301 - DNA, 1200 bp, synthetic construct
  misc_feature 1..1200: note = Variant of ERED chimera of Old Yellow Enzyme
  source 1..1200: mol_type = other DNA
atgtctttcgtgaaggactttaagccgcaagcactgcgcgacaccaacctgttcgaacctattaaaattgggaacacacagctggctcatcgcgttgtaatgcctccgctgacccgcatgcgcgctacccatccgggcaacattccgaacaaggagtgggctgcggtttactacggccagcgtgcacagcgtccggggacaatgattatcacggaggcgacgttcatcagcccgcaggcaggtgggtacgataacaagcctggtgtttggtcagacgaacagatcgccgaatggaagaatatcttcctggctattcatgactgtcagtcatttgcgtgggtgcaactgcaggtcctgggctgggccgcctttccggataccctggcgcgtgatgggttacgttacgattctgcctccgataatgtgtatatgaatgcggaacaggaggaaaaagcgaaaaaagctaacaatccgcaacatagcattactaaagacgaaattaaacaatatgtcaaagaatatgttcaggcagctaagaactcgatcgctgcgggtgcggacggcgtggaaattcactcagccaacggttatctgttaaatcagttcctggatccgcacagcaacaaccgcaccgatgagtatgggggctcaattgaaaatcgtgcacgttttactctggaagtcgttgacgcggtggttgatgccatcggcccagaaaaagtgggtttacgtctgagtccgtacggcacgttcaactctatgtcgggcggccgcgaaacgtgtattgttgctcagtatgcctatgtcctgggtgagctggagcgtcgcgccaaggcggggaaacgcctggcgtttgttcatttagtcgaaccacgcgtgacagacccttggctggttgagggggagggcgaatactcagagggcactaacgattttgcttattccatttggaaaggtccgattatccgtgccggcaactatgcactacatcctgaagtagtgcgcgagcaagttaaggacccgcgcaccctgatcggctacggccgcttctttatttcaaatccagacctggtttaccgcttagaagaaggtctgccactgaacaagtatgaccgttctacgttctacaccgggagcgcggagggttacatcgactacccgacctacgaagaagccgtagatctgggctggaacaaaaac

SEQ ID NO: 302 - protein, 400 aa, synthetic construct
  REGION 1..400: note = Variant of ERED chimera of Old Yellow Enzyme
MSFVKDFKPQALRDTNLFEPIKIGNTQLAHRVVMPPLTRMRATHPGNIPNKEWAAVYYGQRAQRPGTMIITEATFISPQAGGYDNKPGVWSDEQIAEWKNIFLAIHDCQSFAWVQLQVLGWAAFPDTLARDGLRYDSASDNVYMNAEQEEKAKKANNPQHSITKDEIKQYVKEYVQAAKNSIAAGADGVEIHSANGYLLNQFLDPHSNNRTDEYGGSIENRARFTLEVVDAVVDAIGPEKVGLRLSPYGTFNSMSGGRETCIVAQYAYVLGELERRAKAGKRLAFVHLVEPRVTDPWLVEGEGEYSEGTNDFAYSIWKGPIIRAGNYALHPEVVREQVKDPRTLIGYGRFFISNPDLVYRLEEGLPLNKYDRSTFYTGSAEGYIDYPTYEEAVDLGWNKN

SEQ ID NO: 303 - DNA, 1200 bp, synthetic construct
  misc_feature 1..1200: note = Variant of ERED chimera of Old Yellow Enzyme
  source 1..1200: mol_type = other DNA
atgtctttcgttaaggacttcaagccgcaagcactgcgcgacaccaacctgttcgaacctattaaaattgggaacacacagctggctcatcgcgttgtaatgcctccgctgacccgcatgcgcgctacccatccgggcaacattccgaacaaggagtgggctgcggtttactacggccagcgtgcacagcgtccggggacaatgattatcacggaggcgacgttcatcagcccgcaggcaggtgggtacgataacaagcctggtgtttggtcagacgaacagatcgccgaatggaagaaaatcttcctggctattcatgactgtcagtcatttgcgtgggtgcaactgcaggtcctgggctgggccgcctttccggataccctggcgcgtgatgggttacgttacgattctgcctccgataatgtgtatatgaatgcggaacaggaggaaaaagcgaaaaaagctaacaatccgcaacatagcattactaaagacgaaattaaacaatatgtcaaagaatatgttcaggcagctaagaactcgatcgctgcgggtgcggacggcgtggaaattcactcagccaacggttatctgttaaatcagttcctggatccgcacagcaacaaccgcaccgatgagtatgggggctcaattgaaaatcgtgcacgttttactctggaagtcgttgacgcggtggttgatgccatcggcccagaaaaagtgggtttacgtctgagtccgtacggcacgttcaactctatgtcgggcggcgcggaaacgtgtattgttgctcagtatgcctatgtcctgggtgagctggagcgtcgcgccaaggcggggaaacgcctggcgtttgttcatttagtcgaaccacgcgtgacagacccttggctggtcgagggggaaggcgaatactcagagggcactaacgattttgcttattccatttggaaaggtccgattatccgtgccggcgggtatgcactacatcctgaagtagtgcgcgagcaagttaaggacccgcgcaccctgatcggctacggccgcttctttatttcaaatccagacctggtttaccgcttagaagaaggtctgccactgaacaagtatgaccgttctacgttctacaccacgagcgcggagggttacatcgactacccgacctacgaagaagccgtagatctgggctggaacaaaaac

SEQ ID NO: 304 - protein, 400 aa, synthetic construct
  REGION 1..400: note = Variant of ERED chimera of Old Yellow Enzyme
MSFVKDFKPQALRDTNLFEPIKIGNTQLAHRVVMPPLTRMRATHPGNIPNKEWAAVYYGQRAQRPGTMIITEATFISPQAGGYDNKPGVWSDEQIAEWKKIFLAIHDCQSFAWVQLQVLGWAAFPDTLARDGLRYDSASDNVYMNAEQEEKAKKANNPQHSITKDEIKQYVKEYVQAAKNSIAAGADGVEIHSANGYLLNQFLDPHSNNRTDEYGGSIENRARFTLEVVDAVVDAIGPEKVGLRLSPYGTFNSMSGGAETCIVAQYAYVLGELERRAKAGKRLAFVHLVEPRVTDPWLVEGEGEYSEGTNDFAYSIWKGPIIRAGGYALHPEVVREQVKDPRTLIGYGRFFISNPDLVYRLEEGLPLNKYDRSTFYTTSAEGYIDYPTYEEAVDLGWNKN

SEQ ID NO: 305 - DNA, 1200 bp, synthetic construct
  misc_feature 1..1200: note = Variant of ERED chimera of Old Yellow Enzyme
  source 1..1200: mol_type = other DNA
atgtctttcgttaaggacttcaagccgcaagcactgcgcgacaccaacctgttcgaacctattaaaattgggaacacacagctggctcatcgcgttgtaatgcctccgctgacccgcatgcgcgctacccatccgggcaacattccgaacaaggagtgggctgcggtttactacggccagcgtgcacagcgtccggggacaatgattatcacggaggcgacgttcatcagcccgcaggcaggtgggtacgataacaagcctggtgtttggtcagacgaacaggttgccgaatggaagaacatcttcctggctattcatgactgtcagtcatttgcgtgggtgcaactgcaggtcctgggctgggccgcctttccggataccctggcgcgtgatgggttacgttacgattctgcctccgataatgtgtatatgaatgcggaacaggaggaaaaagcgaaaaaagctaacaatccgcaacatagcattactaaagacgaaattaaacaatatgtcaaagaatatgttcaggcagctaagaactcgatcgctgcgggtgcggacggcgtggaaattcactcagccaacggttatctgttaaatcagttcctggatccgcacagcaacaaccgcaccgatgagtatgggggctcaattgaaaatcgtgcacgttttactctggaagtcgttgacgcggtggttgatgccatcggcccagaaaaagtgggtttacgtctgagtccgtacggcacgttcaactctatgtcgggcggcgcggaaacgtgtattgttgctcagtatgcctatgtcctgggtgagctggagcgtcgcgccaaggcggggaaacgcctggcgtttgttcatttagtcgaaccacgcgtgacagacccttggctggttgagggggagggcgaatactcagagggcactaacgattttgcttattccatttggaaaggtccgattatccgtgccggcaactatgcactacatcctgaagtagtgcgcgagcaagttaaggacggccgcaccctgatcggctacggccgcttctttatttcaaatccagacctggtttaccgcttagaagaaggtctgccactgaacaagtatgaccgttctacgttctacaccatgagcgcggagggttacatcgactacccgacctacgaagaagccgtagatctgggctggaacaaaaac

SEQ ID NO: 306 - protein, 400 aa, synthetic construct
  REGION 1..400: note = Variant of ERED chimera of Old Yellow Enzyme
MSFVKDFKPQALRDTNLFEPIKIGNTQLAHRVVMPPLTRMRATHPGNIPNKEWAAVYYGQRAQRPGTMIITEATFISPQAGGYDNKPGVWSDEQVAEWKNIFLAIHDCQSFAWVQLQVLGWAAFPDTLARDGLRYDSASDNVYMNAEQEEKAKKANNPQHSITKDEIKQYVKEYVQAAKNSIAAGADGVEIHSANGYLLNQFLDPHSNNRTDEYGGSIENRARFTLEVVDAVVDAIGPEKVGLRLSPYGTFNSMSGGAETCIVAQYAYVLGELERRAKAGKRLAFVHLVEPRVTDPWLVEGEGEYSEGTNDFAYSIWKGPIIRAGNYALHPEVVREQVKDGRTLIGYGRFFISNPDLVYRLEEGLPLNKYDRSTFYTMSAEGYIDYPTYEEAVDLGWNKN

SEQ ID NO: 307 - DNA, 1200 bp, synthetic construct
  misc_feature 1..1200: note = Variant of ERED chimera of Old Yellow Enzyme
  source 1..1200: mol_type = other DNA
atgtctttcgttaaggacttcaagccgcaagcactgcgcgacaccaacctgttcgaacctattaaaattgggaacacacagctggctcatcgcgttgtaatgcctccgctgacccgcatgcgcgctacccatccgggcaacattccgaacaaggagtgggctgcggtttactacggccagcgtgcacagcgtccggggacaatgattatcacggaggcgacgttcatcagcccgcaggcaggtgggtacgataacaagcctggtgtttggtcagacgaacagatcgccgaatggaagaaaatcttcctggctattcatgactgtcagtcatttgcgtgggtgcaactgcaggtcctgggctgggccgcctttccggataccctggcgcgtgatgggttacgttacgattctgcctccgataatgtgtatatgaatgcggaacaggaggaaaaagcgaaaaaagctaacaatccgcaacatagcattactaaagacgaaattaaacaatatgtcaaagaatatgttcaggcagctaagaactcgatcgctgcgggtgcggacggcgtggaaattcactcagccaacggttatctgttaaatcagttcctggatccgcacagcaacaaccgcaccgatgagtatgggggctcaattgaaaatcgtgcacgttttactctggaagtcgttgacgcggtggttgatgccatcggcccagaaaaagtgggtttacgtctgagtccgtacggcacgttcaactctatgtcgggcggcgcggaaacgtgtattgttgctcagtatgcctatgtcctgggtgagctggagcgtcgcgccaaggcggggaaacgcctggcgtttgttcatttagtcgaaccacgcgtgacagacccttggctggttgagggggagggcgaatactcagagggcactaacgattttgcttattccatttggaaaggtccgattatccgtgccggcgggtatgcactacatcctgaaaccgtgcgcgagcaagttaaggacccgcgcaccctgatcggctacggccgcttctttatttcaaatccagacctggtttaccgcttagaagaaggtctgccactgaacaagtatgaccgttctacgttctacaccacgagcgcggagggttacatcgactacccgacctacgaagaagccgtagatctgggctggaacaaaaac

SEQ ID NO: 308 - protein, 400 aa, synthetic construct
  REGION 1..400: note = Variant of ERED chimera of Old Yellow Enzyme
MSFVKDFKPQALRDTNLFEPIKIGNTQLAHRVVMPPLTRMRATHPGNIPNKEWAAVYYGQRAQRPGTMIITEATFISPQAGGYDNKPGVWSDEQIAEWKKIFLAIHDCQSFAWVQLQVLGWAAFPDTLARDGLRYDSASDNVYMNAEQEEKAKKANNPQHSITKDEIKQYVKEYVQAAKNSIAAGADGVEIHSANGYLLNQFLDPHSNNRTDEYGGSIENRARFTLEVVDAVVDAIGPEKVGLRLSPYGTFNSMSGGAETCIVAQYAYVLGELERRAKAGKRLAFVHLVEPRVTDPWLVEGEGEYSEGTNDFAYSIWKGPIIRAGGYALHPETVREQVKDPRTLIGYGRFFISNPDLVYRLEEGLPLNKYDRSTFYTTSAEGYIDYPTYEEAVDLGWNKN

SEQ ID NO: 309 - DNA, 1200 bp, synthetic construct
  misc_feature 1..1200: note = Variant of ERED chimera of Old Yellow Enzyme
  source 1..1200: mol_type = other DNA
atgtctttcgtgaaggactttaagccgcaagcactgcgcgacaccaacctgttcgaacctattaaaattgggaacacacagctggctcatcgcgttgtaatgcctccgctgacccgcatgcgcgctacccatccgggcaacattccgaacaaggagtgggctgcggtttactacggccagcgtgcacagcgtccggggacaatgattatcacggaggcgacgttcatcagcccgcaggcaggtgggtacgataacaagcctggtgtttggtcagacgaacagatcgccgaatggaagaatatcttcctggctattcatgactgtcagtcatttgcgtgggtgcaactgcaggtcctgggctgggccgcctttccggataccctggcgcgtgatgggttacgttacgattctgcctccgataatgtgtatatgaatgcggaacaggaggaaaaagcaaaaaaagctaacaatccgcaacatagcattactaaagacgaaattaaacaatatgtcaaagaatatgttcaggcagctaagaactcgatcgctgcgggtgcggacggcgtggaaattcactcagccaacggttatctgttaaatcagttcctggatccgcacagcaacaaccgcaccgatgagtatgggggctcaattgaaaatcgtgcacgttttactctggaagtcgttgacgcggtggttgatgccatcggcccagaaaaagtgggtttacgtctgagtccgtacggcacgttcaactctatgtcgggcggcgcggaaacgtgtattgttgctcagtatgcctatgtcctgggtgagctggagcgtcgcgccaaggcggggaaacgcctggcgtttgttcatttagtcgaaccacgcgtgacagacccttggctggttgagggggagggcgaatactcagagggcactaacgattttgcttattccatttggaaaggtccgattatccgtgccggcaactatgcactacatcctgaaaccgtgcgcgagcaagttaaggacccgcgcaccctgatcggctacggccgcttctttatttcaaatccagacctggtttaccgcttagaagaaggtctgccactgaacaagtatgaccgttctacgttctacaccatgagcgcggagggttacatcgactacccgacctacgaagaagccgtagatctgggctggaacaaaaac

SEQ ID NO: 310 - protein, 400 aa, synthetic construct
  REGION 1..400: note = Variant of ERED chimera of Old Yellow Enzyme
MSFVKDFKPQALRDTNLFEPIKIGNTQLAHRVVMPPLTRMRATHPGNIPNKEWAAVYYGQRAQRPGTMIITEATFISPQAGGYDNKPGVWSDEQIAEWKNIFLAIHDCQSFAWVQLQVLGWAAFPDTLARDGLRYDSASDNVYMNAEQEEKAKKANNPQHSITKDEIKQYVKEYVQAAKNSIAAGADGVEIHSANGYLLNQFLDPHSNNRTDEYGGSIENRARFTLEVVDAVVDAIGPEKVGLRLSPYGTFNSMSGGAETCIVAQYAYVLGELERRAKAGKRLAFVHLVEPRVTDPWLVEGEGEYSEGTNDFAYSIWKGPIIRAGNYALHPETVREQVKDPRTLIGYGRFFISNPDLVYRLEEGLPLNKYDRSTFYTMSAEGYIDYPTYEEAVDLGWNKN

SEQ ID NO: 311 - DNA, 1200 bp, synthetic construct
  misc_feature 1..1200: note = Variant of ERED chimera of Old Yellow Enzyme
  source 1..1200: mol_type = other DNA
atgtctttcaccaaggacttcaagccgcaagcactgcgcgacaccaacctgttcgaacctattaaaattgggaacacacagctggctcatcgcgttgtaatgcctccgctgacccgcatgcgcgctacccatccgggcaacattccgaacaaggagtgggctgcggtttactacggccagcgtgcacagcgtccggggacaatgattatcacggaggcgacgttcatcagcccgcaggcaggtgggtacgataacaagcctggtatttggtcagacgaacaggttgccgaatggaaggagatcttcctggctattcatgactgtcagtcatttgcgtgggtgcaactgcaggtcctgggctgggccgcctttccggataccctggcgcgtgatgggttacgttacgattctgcctccgataatgtgtatatgaatgcggaacaggaggaaaaagcgaaaaaagctaacaatccgcaacatagcattactaaagacgaaattaaacaatatgtcaaagaatatgttcaggcagctaagaactcgatcgctgcgggtgcggacggcgtggaaattcactcagccaacggttatctgttaaatcagttcctggatccgcacagcaaccgtcgcaccgatgagtatgggggctcaattgaaaatcgtgcacgttttactctggaagtcgttgacgcggtggttgatgccatcggcccagaaaaagtgggtttacgtctgagtccgtacggcacgttcaactctatgtcgggcggcaaagaaacgtgtattgttgctcagtatgcctatgtcctgggtgagctggagcgtcgcgccaaggcggggaaacgcctggcgtttgttcatttagtcgaaccacgcgtgacagacccttggctggttgagggggagggcgaatactcagagggcactaacgattttgcttattccatttggaaaggtccgattatccgtgccggcaactatgcactacatcctgaagtcgtgcgcgaacaagttaaggaccctcgcaccctgatcggctacggccgcttctttatttcaaatccagacctggttacgcgcttagaagaaggtctgccactgaacaagtatgaccgttctacgttctacacccaaagcgcggagggttacatcgactacccgacctacgaagaagccgtagatctgggctggaacaaaaac

SEQ ID NO: 312 - protein, 400 aa, synthetic construct
  REGION 1..400: note = Variant of ERED chimera of Old Yellow Enzyme
MSFTKDFKPQALRDTNLFEPIKIGNTQLAHRVVMPPLTRMRATHPGNIPNKEWAAVYYGQRAQRPGTMIITEATFISPQAGGYDNKPGIWSDEQVAEWKEIFLAIHDCQSFAWVQLQVLGWAAFPDTLARDGLRYDSASDNVYMNAEQEEKAKKANNPQHSITKDEIKQYVKEYVQAAKNSIAAGADGVEIHSANGYLLNQFLDPHSNRRTDEYGGSIENRARFTLEVVDAVVDAIGPEKVGLRLSPYGTFNSMSGGKETCIVAQYAYVLGELERRAKAGKRLAFVHLVEPRVTDPWLVEGEGEYSEGTNDFAYSIWKGPIIRAGNYALHPEVVREQVKDPRTLIGYGRFFISNPDLVTRLEEGLPLNKYDRSTFYTQSAEGYIDYPTYEEAVDLGWNKN

SEQ ID NO: 313 - DNA, 1200 bp, synthetic construct
  misc_feature 1..1200: note = Variant of ERED chimera of Old Yellow Enzyme
  source 1..1200: mol_type = other DNA
atgtctttcaccaaggacttcaagccgcaagcactgcgcgacaccaacctgttcgaacctattaaaattgggaacacacagctggctcatcgcgttgtaatgcctccgctgacccgcatgcgcgctacccatccgggcaacattccgaacaaggagtgggctgcggtttactacggccagcgtgcacagcgtccggggacaatgattatcacggaggcgacgttcatcagcccgcaggcaggtgggtacgataacaagcctggtgtttggtcagacgaacaggttgccgaatggaaggagatcttcctggctattcatgactgtcagtcatttgcgtgggtgcaactgcaggtcctgggctgggccgcctttccggataccctggcgcgtgatgggttacgttacgattctgcctccgataatgtgtatatgaatgcggaacaggaggaaaaagcgaaaaaagctaacaatccgcaacatagcattactaaagacgaaattaaacaatatgtcaaagaatatgttcaggcagctaagaactcgatcgctgcgggtgcggacggcgtggaaattcactcagccaacggttatctgttaaatcagttcctggatccgcacagcaaccgtcgcaccgatgagtatgggggctcaattgaaaatcgtgcacgttttactctggaagtcgttgacgcggtggttgatgccatcggcccagaaaaagtgggtttacgtctgagtccgtacggcacgttcaactctatgtcgggcggcaaagaaacgtgtattgttgctcagtatgcctatgtcctgggtgagctggagcgtcgcgccaaggcggggaaacgctgtgcgtttgttcatttagtcgaaccacgcgtgacagacccttggctggttgagggggagggcgaatactcagagggcactaacgattttgcttattccatttggaaaggtccgattatccgtgccggcaactatgcactacatcctgaagtcgtgcgcgaacaagttaaggaccctcgcaccctgatcggctacggccgcttctttatttcaaatccagacctggttacgcgcttagaagaaggtctgccactgaacaagtatgaccgttctacgttctacacccaaagcgcggagggttacatcgactacccgacctacgaagaagccgtagatctgggctggaacaaaaac

SEQ ID NO: 314 - protein, 400 aa, synthetic construct
  REGION 1..400: note = Variant of ERED chimera of Old Yellow Enzyme
MSFTKDFKPQALRDTNLFEPIKIGNTQLAHRVVMPPLTRMRATHPGNIPNKEWAAVYYGQRAQRPGTMIITEATFISPQAGGYDNKPGVWSDEQVAEWKEIFLAIHDCQSFAWVQLQVLGWAAFPDTLARDGLRYDSASDNVYMNAEQEEKAKKANNPQHSITKDEIKQYVKEYVQAAKNSIAAGADGVEIHSANGYLLNQFLDPHSNRRTDEYGGSIENRARFTLEVVDAVVDAIGPEKVGLRLSPYGTFNSMSGGKETCIVAQYAYVLGELERRAKAGKRCAFVHLVEPRVTDPWLVEGEGEYSEGTNDFAYSIWKGPIIRAGNYALHPEVVREQVKDPRTLIGYGRFFISNPDLVTRLEEGLPLNKYDRSTFYTQSAEGYIDYPTYEEAVDLGWNKN

SEQ ID NO: 315 - DNA, 1200 bp, synthetic construct
  misc_feature 1..1200: note = Variant of ERED chimera of Old Yellow Enzyme
  source 1..1200: mol_type = other DNA
atgtctttcaccaaggacttcaagccgcaagcactgcgcgacaccaacctgttcgaacctattaaaattgggaacacacagctggctcatcgcgttgtaatgcctccgctgacccgcatgcgcgctacccatccgggcaacattccgaacaaggagtgggctgcggtttactacggccagcgtgcacagcgtccggggacaatgattatcacggaggcgacgttcatcagcccgcaggcaggtgggtacgataacaagcctggtgtttggtcagacgaacaggttgccgaatggaaggagatcttcctggctattcatgactgtcagtcatttgcgtgggtgcaactgcaggtcctgggctgggccgcctttccggataccctggcgcgtgatgggttacgttacgattctgcctccgataatgtgtatatgaatgcggaacaggaggaaaaagcgaaaaaagctaacaatccgcaacatagcattactaaagacgaaattaaacaatatgtcaaagaatatgttcaggcagctaagaactcgatcgctgcgggtgcggacggcgtggaaattcactcagccaacggttatctgttaaatcagttcctggatccgcacagcaaccgtcgcaccgatgagtatgggggctcaattgaaaatcgtgcacgttttactctggaagtcgttgacgcggtggttgatgccatcggcccagaaaaagtgggtattcgtctgagtccgtacggcacgttcaactctatgtcgggcggcaaagaaacgtgtattgttgctcagtatgcctatgtcctgggtgagctggagcgtcgcgccaaggcggggaaacgcctggcgtttgttcatttagtcgaaccacgcgtgacagacccttggctggttgagggggagggcgaatactcagagggcactaacgattttgcttattccatttggaaaggtccgattatccgtgccggcaactatgcactacatcctgaagtcgtgcgcgaacaagttaaggaccctcgcaccctgatcggctacggccgcttctttatttcaaatccagacctggttacgcgcttagaagaaggtctgccactgaacaagtatgaccgttctacgttctacacccaaagcgcggagggttacatcgactacccgacctacgaagaagccgtagatctgggctggaacaaaaac

SEQ ID NO: 316 - protein, 400 aa, synthetic construct
  REGION 1..400: note = Variant of ERED chimera of Old Yellow Enzyme
MSFTKDFKPQALRDTNLFEPIKIGNTQLAHRVVMPPLTRMRATHPGNIPNKEWAAVYYGQRAQRPGTMIITEATFISPQAGGYDNKPGVWSDEQVAEWKEIFLAIHDCQSFAWVQLQVLGWAAFPDTLARDGLRYDSASDNVYMNAEQEEKAKKANNPQHSITKDEIKQYVKEYVQAAKNSIAAGADGVEIHSANGYLLNQFLDPHSNRRTDEYGGSIENRARFTLEVVDAVVDAIGPEKVGIRLSPYGTFNSMSGGKETCIVAQYAYVLGELERRAKAGKRLAFVHLVEPRVTDPWLVEGEGEYSEGTNDFAYSIWKGPIIRAGNYALHPEVVREQVKDPRTLIGYGRFFISNPDLVTRLEEGLPLNKYDRSTFYTQSAEGYIDYPTYEEAVDLGWNKN

SEQ ID NO: 317 - DNA, 1200 bp, synthetic construct
  misc_feature 1..1200: note = Variant of ERED chimera of Old Yellow Enzyme
  source 1..1200: mol_type = other DNA
atgtctttcgttaaggactttaagccgcaagcactgcgcgacaccaacctgttcgaacctattaaaattgggaacacacagctggctcatcgcgttgtaatgcctccgctgacccgcatgcgcgctacccatccgggcaacattccgaacaaggagtgggctgcggtttactacggccagcgtgcacagcgtccggggacaatgattatcacggaggcgacgttcatcagcccgcaggcaggtgggtacgataacaagcctggtgtttggtcagacgaacaggtcgccgaatggaagaaaatcttcctggctattcatgactgtcagtcatttgcgtgggtgcaactgcagtgtctgggctgggccgcctttccggataccctggcgcgtgatgggttacgttacgattctgcctccgataatgtgtatatgaatgcggaacaggaggaaaaagcgaaaaaagctaacaatccgcaacatagcattactaaagacgaaattaaacaatatgtcaaagaatatgttcaggcagctaagaactcgatcgctgcgggtgcggacggcgtggaaattcactcagccaacggttatctgttaaatcagttcctggatccgcacagcaacaaccgcaccgatgagtatgggggctcaattgaaaatcgtgcacgttttactctggaagtcgttgacgcggtggttgatgccatcggcccagaaaaagtgggtttacgtctgagtccgtacggcacgttcaactctatgtcgggcggcgcggaaacgtgtattgttgctcagtatgcctatgtcctgggtgagctggagcgtcgcgccaaggcggggaaacgcctggcgtttgttcatttagtcgaaccacgcgtgacagacccttggctggttgagggggagggcgaatactcagagggcactaacgattttgcttattccatttggaaaggtccgattatccgtgccggcaactatgcactacatcctgaagtagtgcgcgaacaagttaaggaccctcgcaccctgatcggctacggccgcttctttatttcaaatccagacctggtttaccgcttagaagaaggtctgccactgaacaagtatgaccgttctacgttctacaccgggagcgcggagggttacatcgactacccgacctacgaagaagccgtagatctgggctggaacaaaaac

SEQ ID NO: 318 - protein, 400 aa, synthetic construct
  REGION 1..400: note = Variant of ERED chimera of Old Yellow Enzyme
MSFVKDFKPQALRDTNLFEPIKIGNTQLAHRVVMPPLTRMRATHPGNIPNKEWAAVYYGQRAQRPGTMIITEATFISPQAGGYDNKPGVWSDEQVAEWKKIFLAIHDCQSFAWVQLQCLGWAAFPDTLARDGLRYDSASDNVYMNAEQEEKAKKANNPQHSITKDEIKQYVKEYVQAAKNSIAAGADGVEIHSANGYLLNQFLDPHSNNRTDEYGGSIENRARFTLEVVDAVVDAIGPEKVGLRLSPYGTFNSMSGGAETCIVAQYAYVLGELERRAKAGKRLAFVHLVEPRVTDPWLVEGEGEYSEGTNDFAYSIWKGPIIRAGNYALHPEVVREQVKDPRTLIGYGRFFISNPDLVYRLEEGLPLNKYDRSTFYTGSAEGYIDYPTYEEAVDLGWNKN

SEQ ID NO: 319 - DNA, 1200 bp, synthetic construct
  misc_feature 1..1200: note = Variant of ERED chimera of Old Yellow Enzyme
  source 1..1200: mol_type = other DNA
atgtctttcgttaaggactttaagccgcaagcactgcgcgacaccaacctgttcgaacctattaaaattgggaacacacagctggctcatcgcgttgtaatgcctccgctgacccgcatgcgcgctacccatccgggcaacattccgaacaaggagtgggctgcggtttactacggccagcgtgcacagcgtccggggacaatgattatcacggaggcgacgttcatcagcccgcaggcaggtgggtacgataacaagcctggtgtttggtcagacgaacaggtcgccgaatggaagaaaatcttcctggctattcatgactgtcagtcatttgcgtgggtgcaactgcaggtcctgggctgggccgcctttccggataccctggcgcgtgatgggttacgttacgattctgcctccgataatgtgtatatgaatgcggaacaggaggaaaaagcgaaaaaagctaacaatccgcaacatagcattactaaagacgaaattaaacaatatgtcaaagaatatgttcaggcagctaagaactcgatcgctgcgggtgcggacggcgtggaaattcactcagccaacggttatctgttaaatcagttcctggatccgcacagcaacaaccgcaccgatgagtatgggggctcaattgaaaatcgtgcacgttttactctggaagtcgttgacgcggtggttgatgccatcggcccagaaaaagtgggtttacgtctgagtccgtacggcacgttcaactctatgtcgggcggcgcggaaacgtgtattgttgctcagtatgcctatgtcctgggtgagctggagcgtcgcgccaaggcggggaaacgcctggcgtttgttcatttagtcgaaccacgcgtgacagacccttggctggttgagggggagggcgaatactcagagggcactaacgattttgcttattccatttggaaaggtccgattatccgtgccggcaactatgcactacatcctgaagtagtgcgcgaacaagttaaggaccctcgcaccctgatcggctacggccgcttctttatttcaaatccagacctggtttaccgcttagaagaaggtctgccactgaacaagtatgaccgttctacgttctacaagcaaagcgcggagggttacatcgactacccgacctacgaagaagccgtagatctgggctggaacaaaaac

SEQ ID NO: 320 - protein, 400 aa, synthetic construct
  REGION 1..400: note = Variant of ERED chimera of Old Yellow Enzyme
MSFVKDFKPQALRDTNLFEPIKIGNTQLAHRVVMPPLTRMRATHPGNIPNKEWAAVYYGQRAQRPGTMIITEATFISPQAGGYDNKPGVWSDEQVAEWKKIFLAIHDCQSFAWVQLQVLGWAAFPDTLARDGLRYDSASDNVYMNAEQEEKAKKANNPQHSITKDEIKQYVKEYVQAAKNSIAAGADGVEIHSANGYLLNQFLDPHSNNRTDEYGGSIENRARFTLEVVDAVVDAIGPEKVGLRLSPYGTFNSMSGGAETCIVAQYAYVLGELERRAKAGKRLAFVHLVEPRVTDPWLVEGEGEYSEGTNDFAYSIWKGPIIRAGNYALHPEVVREQVKDPRTLIGYGRFFISNPDLVYRLEEGLPLNKYDRSTFYKQSAEGYIDYPTYEEAVDLGWNKN

SEQ ID NO: 321 - DNA, 1200 bp, synthetic construct
  misc_feature 1..1200: note = Variant of ERED chimera of Old Yellow Enzyme
  source 1..1200: mol_type = other DNA
atgtctttcgttaaggactttaagccgcaagcactgcgcgacaccaacctgttcgaacctattaaaattgggaacacacagctggctcatcgcgttgtaatgcctccgctgacccgcatgcgcgctacccatccgggcaacattccgaacaaggagtgggctgcggtttactacggccagcgtgcacagcgtccggggacaatgattatcacggaggcgacgttcatcagcccgcaggcaggtgggtacgataacaagcctggtgtttggtcagacgaacaggtcgccgaatggaagaaaatcttcctggctattcatgactgtcagtcatttgcgtgggtgcaactgcaggtcctgggctgggccgcctttccggataccctggcgcgtgatgggttacgttacgattctgcctccgataatgtgtatatgaatgcggaacaggaggaaaaagcgaaaaaagctaacaatccgcaacatagcattactaaagacgaaattaaacaatatgtcaaagaatatgttcaggcagctaagaactcgatcgctgcgggtgcggacggcgtggaaattcactcagccaacggttatctgttaaatcagttcctggatccgcacagcaacaaccgcaccgatgagtatgggggctcaattgaaaatcgtgcacgttttactctggaagtcgttgacgcggtggttgatgccatcggcccagaaaaagtgggtttacgtctgagtccgtacggcacgttcaactctatgtcgggcggcgcggaaacgtgtattgttgctcagtatgcctatgtcctgggtgagctggagcgtcgcgccaaggcggggaaacgcctggcgtttgttcatttagtcgaaccacgcgtgacagacccttggctggttgagggggagggcgaatactcagagggcactaacgattttgcttattccatttggaaaggtccgattatccgtgccggcaactatgcactacatcctgaagtagtgcgcgaacaagttaaggaccctcgcaccctgatcggctacggccgcttctttatttcaaatccagacctggtttaccgcttagaagaaggtctgccactgaacaagtatgaccgttctagtttctacacccaaagcgcggagggttacatcgactacccgacctacgaagaagccgtagatctgggctggaacaaaaac

SEQ ID NO: 322 - protein, 400 aa, synthetic construct
  REGION 1..400: note = Variant of ERED chimera of Old Yellow Enzyme
MSFVKDFKPQALRDTNLFEPIKIGNTQLAHRVVMPPLTRMRATHPGNIPNKEWAAVYYGQRAQRPGTMIITEATFISPQAGGYDNKPGVWSDEQVAEWKKIFLAIHDCQSFAWVQLQVLGWAAFPDTLARDGLRYDSASDNVYMNAEQEEKAKKANNPQHSITKDEIKQYVKEYVQAAKNSIAAGADGVEIHSANGYLLNQFLDPHSNNRTDEYGGSIENRARFTLEVVDAVVDAIGPEKVGLRLSPYGTFNSMSGGAETCIVAQYAYVLGELERRAKAGKRLAFVHLVEPRVTDPWLVEGEGEYSEGTNDFAYSIWKGPIIRAGNYALHPEVVREQVKDPRTLIGYGRFFISNPDLVYRLEEGLPLNKYDRSSFYTQSAEGYIDYPTYEEAVDLGWNKN

SEQ ID NO: 323 - DNA, 1200 bp, synthetic construct
  misc_feature 1..1200: note = Variant of ERED chimera of Old Yellow Enzyme
  source 1..1200: mol_type = other DNA
atgtctttcgttaaggactttaagccgcaagcactgcgcgacaccaacctgttcgaacctattaaaattgggaacacacagctggctcatcgcgttgtaatgcctccgctgacccgcatgcgcgctacccatccgggcaacattccgaacaaggagtgggctgcggtttactacggccagcgtgcacagcgtccggggacaatgattatcacggaggcgacgttcatcagcccgcaggcaggtgggtacgataacaagcctggtgtttggtcagacgaacaggtcgccgaatggaagaaaatcttcctggctattcatgactgtcagtcatttgcgtgggtgcaactgcaggctctgggctgggccgcctttccggataccctggcgcgtgatgggttacgttacgattctgcctccgataatgtgtatatgaatgcggaacaggaggaaaaagcgaaaaaagctaacaatccgcaacatagcattactaaagacgaaattaaacaatatgtcaaagaatatgttcaggcagctaagaactcgatcgctgcgggtgcggacggcgtggaaattcactcagccaacggttatctgttaaatcagttcctggatccgcacagcaacaaccgcaccgatgagtatgggggctcaattgaaaatcgtgcacgttttactctggaagtcgttgacgcggtggttgatgccatcggcccagaaaaagtgggtttacgtctgagtccgtacggcacgttcaactctatgtcgggcggcgcggaaacgtgtattgttgctcagtatgcctatgtcctgggtgagctggagcgtcgcgccaaggcggggaaacgcctggcgtttgttcatttagtcgaaccacgcgtgacagacccttggctggttgagggggagggcgaatactcagagggcactaacgattttgcttattccatttggaaaggtccgattatccgtgccggcaactatgcactacatcctgaagtagtgcgcgaacaagttaaggaccctcgcaccctgatcggctacggccgcttctttatttcaaatccagacctggtttaccgcttagaagaaggtctgccactgaacaagtatgaccgttctacgttctacaccgggagcgcggagggttacatcgactacccgacctacgaagaagccgtagatctgggctggaacaaaaac

SEQ ID NO: 324 - protein, 400 aa, synthetic construct
  REGION 1..400: note = Variant of ERED chimera of Old Yellow Enzyme
MSFVKDFKPQALRDTNLFEPIKIGNTQLAHRVVMPPLTRMRATHPGNIPNKEWAAVYYGQRAQRPGTMIITEATFISPQAGGYDNKPGVWSDEQVAEWKKIFLAIHDCQSFAWVQLQALGWAAFPDTLARDGLRYDSASDNVYMNAEQEEKAKKANNPQHSITKDEIKQYVKEYVQAAKNSIAAGADGVEIHSANGYLLNQFLDPHSNNRTDEYGGSIENRARFTLEVVDAVVDAIGPEKVGLRLSPYGTFNSMSGGAETCIVAQYAYVLGELERRAKAGKRLAFVHLVEPRVTDPWLVEGEGEYSEGTNDFAYSIWKGPIIRAGNYALHPEVVREQVKDPRTLIGYGRFFISNPDLVYRLEEGLPLNKYDRSTFYTGSAEGYIDYPTYEEAVDLGWNKN

SEQ ID NO: 325 - DNA, 1200 bp, synthetic construct
  misc_feature 1..1200: note = Variant of ERED chimera of Old Yellow Enzyme
  source 1..1200: mol_type = other DNA
atgtctttcgttaaggactttaagccgcaagcactgcgcgacaccaacctgttcgaacctattaaaattgggaacacacagctggctcatcgcgttgtaatgcctccgctgacccgcatgcgcgctacccatccgggcaacattccgaacaaggagtgggctgcggtttactacggccagcgtgcacagcgtccggggacaatgattatcacggaggcgacgttcatcagcccgcaggcaggtgggtacgataacaagcctggtgtttggtcagacgaacaggtcgccgaatggaagaaaatcttcctggctattcatgactgtcagtcatttgcgtgggtgcaactgcaggtcctgggctgggccgcctttccggataccctggcgcgtgatgggttacgttacgattctgcctccgataatgtgtatatgaatgcggaacaggaggaaaaagcgaaaaaagctaacaatccgcaacatagcattactaaagacgaaattaaacaatatgtcaaagaatatgttcaggcagctaagaactcgatcgctgcgggtgcggacggcgtggaaattcactcagccaacggttatctgttaaatcagttcctggatccgcacagcaacaaccgcaccgatgagtatgggggctcaattgaaaatcgtgcacgttttactctggaagtcgttgacgcggtggttgatgccatcggcccagaaaaagtgggtttacgtctgagtccgtacggcacgttcaactctatgtcgggcggcgcggaaacgtgtattgttgctcagtatgcctatgtcctgggtgagctggagcgtcgcgccaaggcggggaaacgcctggcgtttgttcatttagtcgaaccacgcgtgacagacccttggctggttgagggggagggcgaatactcagagggcactaacgattttgctttgtccatttggaaaggtccgattatccgtgccggcaactatgcactacatcctgaagtagtgcgcgaacaagttaaggaccctcgcaccctgatcggctacggccgcttctttatttcaaatccagacctggtttaccgcttagaagaaggtctgccactgaacaagtatgaccgttctacgttctacaccgggagcgcggagggttacatcgactacccgacctacgaagaagccgtagatctgggctggaacaaaaac

SEQ ID NO: 326 - protein, 400 aa, synthetic construct
  REGION 1..400: note = Variant of ERED chimera of Old Yellow Enzyme
MSFVKDFKPQALRDTNLFEPIKIGNTQLAHRVVMPPLTRMRATHPGNIPNKEWAAVYYGQRAQRPGTMIITEATFISPQAGGYDNKPGVWSDEQVAEWKKIFLAIHDCQSFAWVQLQVLGWAAFPDTLARDGLRYDSASDNVYMNAEQEEKAKKANNPQHSITKDEIKQYVKEYVQAAKNSIAAGADGVEIHSANGYLLNQFLDPHSNNRTDEYGGSIENRARFTLEVVDAVVDAIGPEKVGLRLSPYGTFNSMSGGAETCIVAQYAYVLGELERRAKAGKRLAFVHLVEPRVTDPWLVEGEGEYSEGTNDFALSIWKGPIIRAGNYALHPEVVREQVKDPRTLIGYGRFFISNPDLVYRLEEGLPLNKYDRSTFYTGSAEGYIDYPTYEEAVDLGWNKN

SEQ ID NO: 327 - DNA, 1200 bp, synthetic construct
  misc_feature 1..1200: note = Variant of ERED chimera of Old Yellow Enzyme
  source 1..1200: mol_type = other DNA
atgtctttcgttaaggactttaagccgcaagcactgcgcgacaccaacctgttcgaacctattaaaattgggaacacacagctggctcatcgcgttgtaatgcctccgctgacccgcatgcgcgctacccatccgggccatattccgaacaaggagtgggctgcggtttactacggccagcgtgcacagcgtccggggacaatgattatcacggaggcgacgttcatcagcccgcaggcaggtgggtacgataacaagcctggtgtttggtcagacgaacaggtcgccgaatggaagaaaatcttcctggctattcatgactgtcagtcatttgcgtgggtgcaactgcaggtcctgggctgggccgcctttccggataccctggcgcgtgatgggttacgttacgattctgcctccgataatgtgtatatgaatgcggaacaggaggaaaaagcgaaaaaagctaacaatccgcaacatagcattactaaagacgaaattaaacaatatgtcaaagaatatgttcaggcagctaagaactcgatcgctgcgggtgcggacggcgtggaaattcactcagccaacggttatctgttaaatcagttcctggatccgcacagcaacaaccgcaccgatgagtatgggggctcaattgaaaatcgtgcacgttttactctggaagtcgttgacgcggtggttgatgccatcggcccagaaaaagtgggtttacgtctgagtccgtacggcacgttcaactctatgtcgggcggcgcggaaacgtgtattgttgctcagtatgcctatgtcctgggtgagctggagcgtcgcgccaaggcggggaaacgcctggcgtttgttcatttagtcgaaccacgcgtgacagacccttggctggttgagggggagggcgaatactcagagggcactaacgattttgcttattccatttggaaaggtccgattatccgtgccggcaactatgcactacatcctgaagtagtgcgcgaacaagttaaggaccctcgcaccctgatcggctacggccgcttctttatttcaaatccagacctggtttaccgcttagaagaaggtctgccactgaacaagtatgaccgttctacgttctacaccgggagcgcggagggttacatcgactacccgacctacgaagaagccgtagatctgggctggaacaaaaac

SEQ ID NO: 328 - protein, 400 aa, synthetic construct
  REGION 1..400: note = Variant of ERED chimera of Old Yellow Enzyme
MSFVKDFKPQALRDTNLFEPIKIGNTQLAHRVVMPPLTRMRATHPGHIPNKEWAAVYYGQRAQRPGTMIITEATFISPQAGGYDNKPGVWSDEQVAEWKKIFLAIHDCQSFAWVQLQVLGWAAFPDTLARDGLRYDSASDNVYMNAEQEEKAKKANNPQHSITKDEIKQYVKEYVQAAKNSIAAGADGVEIHSANGYLLNQFLDPHSNNRTDEYGGSIENRARFTLEVVDAVVDAIGPEKVGLRLSPYGTFNSMSGGAETCIVAQYAYVLGELERRAKAGKRLAFVHLVEPRVTDPWLVEGEGEYSEGTNDFAYSIWKGPIIRAGNYALHPEVVREQVKDPRTLIGYGRFFISNPDLVYRLEEGLPLNKYDRSTFYTGSAEGYIDYPTYEEAVDLGWNKN

SEQ ID NO: 329 - DNA, 1200 bp, synthetic construct
  misc_feature 1..1200: note = Variant of ERED chimera of Old Yellow Enzyme
  source 1..1200: mol_type = other DNA
atgtctttcgttaaggactttaagccgcaagcactgcgcgacaccaacctgttcgaacctattaaaattgggaacacacagctggctcatcgcgttgtaatgcctccgctgacccgcatgcgcgctacccatccgggcaacattccgaacaaggagtgggctgcggtttactacggccagcgtgcacagcgtccggggacaatgattatcacggaggcgacgttcatcagcccgcaggcaggtgggtacgataacaagcctggtgtttggtcagacgaacaggtcgccgaatggaagaaaatcttcctggctattcatgactgtcagtcatttgcgtgggtgcaactgcaggtcctgggctgggccgcctttccggataccctggcgcgtgatgggttacgttacgattctgcctccgataatgtgtatatgaatgcggaaaaggaggaaaaagcgaaaaaagctaacaatccgcaacatagcattactaaagacgaaattaaacaatatgtcaaagaatatgttcaggcagctaagaactcgatcgctgcgggtgcggacggcgtggaaattcactcagccaacggttatctgttaaatcagttcctggatccgcacagcaacaaccgcaccgatgagtatgggggctcaattgaaaatcgtgcacgttttactctggaagtcgttgacgcggtggttgatgccatcggcccagaaaaagtgggtttacgtctgagtccgtacggcacgttcaactctatgtcgggcggcgcggaaacgtgtattgttgctcagtatgcctatgtcctgggtgagctggagcgtcgcgccaaggcggggaaacgcctggcgtttgttcatttagtcgaaccacgcgtgacagacccttggctggttgagggggagggcgaatactcagagggcactaacgattttgcttattccatttggaaaggtccgattatccgtgccggcaactatgcactacatcctgaagtagtgcgcgaacaagttaaggaccctcgcaccctgatcggctacggccgcttctttatttcaaatccagacctggtttaccgcttagaagaaggtctgccactgaacaagtatgaccgttctacgttctacaccgggagcgcggagggttacatcgactacccgacctacgaagaagccgtagatctgggctggaacaaaaac

SEQ ID NO: 330 - protein, 400 aa, synthetic construct
  REGION 1..400: note = Variant of ERED chimera of Old Yellow Enzyme
MSFVKDFKPQALRDTNLFEPIKIGNTQLAHRVVMPPLTRMRATHPGNIPNKEWAAVYYGQRAQRPGTMIITEATFISPQAGGYDNKPGVWSDEQVAEWKKIFLAIHDCQSFAWVQLQVLGWAAFPDTLARDGLRYDSASDNVYMNAEKEEKAKKANNPQHSITKDEIKQYVKEYVQAAKNSIAAGADGVEIHSANGYLLNQFLDPHSNNRTDEYGGSIENRARFTLEVVDAVVDAIGPEKVGLRLSPYGTFNSMSGGAETCIVAQYAYVLGELERRAKAGKRLAFVHLVEPRVTDPWLVEGEGEYSEGTNDFAYSIWKGPIIRAGNYALHPEVVREQVKDPRTLIGYGRFFISNPDLVYRLEEGLPLNKYDRSTFYTGSAEGYIDYPTYEEAVDLGWNKN

SEQ ID NO: 331 - DNA, 1200 bp, synthetic construct
  misc_feature 1..1200: note = Variant of ERED chimera of Old Yellow Enzyme
  source 1..1200: mol_type = other DNA
atgtctttcgttaaggactttaagccgcaagcactgcgcgacaccaacctgttcgaacctattaaaattgggaacacacagctggctcatcgcgttgtaatgcctccgctgacccgcatgcgcgctacccatccgggcaacattccgaacaaggagtgggctgcggtttactacggccagcgtgcacagcgtccggggacaatgattatcacggaggcgacgttcatcagcccgcaggcaggtgggtacgataacaagcctggtgtttggtcagacgaacaggtcgccgaatggaagaaaatcttcctggctattcatgactgtcagtcatttgcgtgggtgcaactgcaggtcctgggctgggccgcctttccggataccctggcgcgtgatgggttacgttacgattctgcctccgataatgtgtatatgaatgcggaattggaggaaaaagcgaaaaaagctaacaatccgcaacatagcattactaaagacgaaattaaacaatatgtcaaagaatatgttcaggcagctaagaactcgatcgctgcgggtgcggacggcgtggaaattcactcagccaacggttatctgttaaatcagttcctggatccgcacagcaacaaccgcaccgatgagtatgggggctcaattgaaaatcgtgcacgttttactctggaagtcgttgacgcggtggttgatgccatcggcccagaaaaagtgggtttacgtctgagtccgtacggcacgttcaactctatgtcgggcggcgcggaaacgtgtattgttgctcagtatgcctatgtcctgggtgagctggagcgtcgcgccaaggcggggaaacgcctggcgtttgttcatttagtcgaaccacgcgtgacagacccttggctggttgagggggagggcgaatactcagagggcactaacgattttgcttattccatttggaaaggtccgattatccgtgccggcaactatgcactacatcctgaagtagtgcgcgaacaagttaaggaccctcgcaccctgatcggctacggccgcttctttatttcaaatccagacctggtttaccgcttagaagaaggtctgccactgaacaagtatgaccgttctacgttctacaccgggagcgcggagggttacatcgactacccgacctacgaagaagccgtagatctgggctggaacaaaaac

SEQ ID NO: 332 - protein, 400 aa, synthetic construct
  REGION 1..400: note = Variant of ERED chimera of Old Yellow Enzyme
MSFVKDFKPQALRDTNLFEPIKIGNTQLAHRVVMPPLTRMRATHPGNIPNKEWAAVYYGQRAQRPGTMIITEATFISPQAGGYDNKPGVWSDEQVAEWKKIFLAIHDCQSFAWVQLQVLGWAAFPDTLARDGLRYDSASDNVYMNAELEEKAKKANNPQHSITKDEIKQYVKEYVQAAKNSIAAGADGVEIHSANGYLLNQFLDPHSNNRTDEYGGSIENRARFTLEVVDAVVDAIGPEKVGLRLSPYGTFNSMSGGAETCIVAQYAYVLGELERRAKAGKRLAFVHLVEPRVTDPWLVEGEGEYSEGTNDFAYSIWKGPIIRAGNYALHPEVVREQVKDPRTLIGYGRFFISNPDLVYRLEEGLPLNKYDRSTFYTGSAEGYIDYPTYEEAVDLGWNKN

SEQ ID NO: 333 - DNA, 1200 bp, synthetic construct
  misc_feature 1..1200: note = Variant of ERED chimera of Old Yellow Enzyme
  source 1..1200: mol_type = other DNA
atgtctttcgttaaggactttaagccgcaagcactgcgcgacaccaacctgttcgaacctattaaaattgggaacacacagctggctcatcgcgttgtaatgcctccgctgacccgcatgcgcgctacccatccgggcaacattccgaacaaggagtgggctgcggtttactacggccagcgtgcacagcgtccggggacaatgattatcacggaggcgacgttcatcagcccgcaggcaggtgggtacgataacaagcctggtgtttggtcagacgaacaggtcgccgaatggaagaaaatcttcctggctattcatgactgtcagtcatttgcgtgggtgcaactgcaggtcctgggctgggccgcctttccggataccctggcgcgtgatgggttacgttacgattctgcctccgataatgtgtatatgaatgcggaacaggaggaaaaagcgaaaaaagctaacaatccgcaacatagcattactaaagacgaaattaaacaatatgtcaaagaatatgttcaggcagctaagaactcgatcgctgcgggtgcggacggcgtggaaattcactcagccaacggttatctgttaaatcagttcctggatccgcacagcaacaaccgcaccgatgagtatgggggctcaattgaaaatcgtgcacgttttactctggaagtcgttgacgcggtggttgatgccatcggcccagaaaaagtgggtttacgtctgagtccgtacggcacgttcaactctatgtcgggcggcgcggaaacgtgtattgttgctcagtatgcctatgtcctgggtgagctggagcgtcgcgccaaggcggggaaacgcctggcgtttgttcatttagtcgaaccacgcgtgacagacccttggctggttgagggggagggcgaatactcagagggcactaacgattttgcttattccatttggaaaggtccgattatccgtgccggcaactatgcactacatcctgaagtagtgcgcgaacaagttaaggaccctcgcaccctgatcggctacggccgcttctttatttcaaatccagacctggtttaccgcttagaagaaggtctgccactgaacaagtatgaccgttctacgttctacacccaaagcgcggagggttacatcgactacccgacctacgaagaagccgtagatctgggctggaacaaaaac

SEQ ID NO: 334 - protein, 400 aa, synthetic construct
  REGION 1..400: note = Variant of ERED chimera of Old Yellow Enzyme
MSFVKDFKPQALRDTNLFEPIKIGNTQLAHRVVMPPLTRMRATHPGNIPNKEWAAVYYGQRAQRPGTMIITEATFISPQAGGYDNKPGVWSDEQVAEWKKIFLAIHDCQSFAWVQLQVLGWAAFPDTLARDGLRYDSASDNVYMNAEQEEKAKKANNPQHSITKDEIKQYVKEYVQAAKNSIAAGADGVEIHSANGYLLNQFLDPHSNNRTDEYGGSIENRARFTLEVVDAVVDAIGPEKVGLRLSPYGTFNSMSGGAETCIVAQYAYVLGELERRAKAGKRLAFVHLVEPRVTDPWLVEGEGEYSEGTNDFAYSIWKGPIIRAGNYALHPEVVREQVKDPRTLIGYGRFFISNPDLVYRLEEGLPLNKYDRSTFYTQSAEGYIDYPTYEEAVDLGWNKN

SEQ ID NO: 335 - DNA, 1200 bp, synthetic construct
  misc_feature 1..1200: note = Variant of ERED chimera of Old Yellow Enzyme
  source 1..1200: mol_type = other DNA
atgtctttcgttaaggactttaagccgcaagcactgcgcgacaccaacctgttcgaacctattaaaattgggaacacacagctggctcatcgcgttgtaatgcctccgctgacccgcatgcgcgctacccatccgggcaacattccgaacaaggagtgggctgcggtttactacggccagcgtgcacagcgtccggggacaatgattatcacggaggcgacgttcatcagcccgcaggcaggtgggtacgataacaagcctggtgtttggtcagacgaacaggtcgccgaatggaagaaaatcttcctggctattcatgactgtcagtcatttgcgtgggtgcaactgcaggtcctgggctgggccgcctttccggataccctggcgcgtgatgggttacgttacgattctgcctccgataatgtgtatatgaatgcggaacaggaggaaaaagcgaaaaaagctaacaatccgcaacatagcattactaaagacgaaattaaacaatatgtcaaagaatatgttcaggcagctaagaactcgatcgctgcgggtgcggacggcgtggaaattcactcagccaacggttatctgttaaatcagttcctggatccgcacagcaacaaccgcaccgatgagtatgggggctcaattgaaaatcgtgcacgttttactctggaagtcgttgacgcggtggttgatgccatcggcccagaaaaagtgggtttacgtctgagtccgtacggcacgttcaactctatgtcgggcggcaaagaaacggttattgttgctcagtatgcctatgtcctgggtgagctggagcgtcgcgccaaggcggggaaacgcctggcgtttgttcatttagtcgaaccacgcgtgacagacccttggctggttgagggggagggcgaatactcagagggcactaacgattttgcttattccatttggaaaggtccgattatccgtgccggcaactatgcactacatcctgaagtagtgcgcgaacaagttaaggaccctcgcaccctgatcggctatggccgcttctttatttcaaatccagacctggtttaccgcttagaagaaggtctgccactgaacaagtatgaccgttctacgttctacaccgggagcgcggagggttacatcgactacccgacctacgaagaagccgtagatctgggctggaacaaaaac

SEQ ID NO: 336 - protein, 400 aa, synthetic construct
  REGION 1..400: note = Variant of ERED chimera of Old Yellow Enzyme
MSFVKDFKPQALRDTNLFEPIKIGNTQLAHRVVMPPLTRMRATHPGNIPNKEWAAVYYGQRAQRPGTMIITEATFISPQAGGYDNKPGVWSDEQVAEWKKIFLAIHDCQSFAWVQLQVLGWAAFPDTLARDGLRYDSASDNVYMNAEQEEKAKKANNPQHSITKDEIKQYVKEYVQAAKNSIAAGADGVEIHSANGYLLNQFLDPHSNNRTDEYGGSIENRARFTLEVVDAVVDAIGPEKVGLRLSPYGTFNSMSGGKETVIVAQYAYVLGELERRAKAGKRLAFVHLVEPRVTDPWLVEGEGEYSEGTNDFAYSIWKGPIIRAGNYALHPEVVREQVKDPRTLIGYGRFFISNPDLVYRLEEGLPLNKYDRSTFYTGSAEGYIDYPTYEEAVDLGWNKN

SEQ ID NO: 337 - DNA, 1200 bp, synthetic construct
  misc_feature 1..1200: note = Variant of ERED chimera of Old Yellow Enzyme
  source 1..1200: mol_type = other DNA
atgtctttcgttaaggactttaagccgcaagcactgcgcgacaccaacctgttcgaacctattaaaattgggaacacacagctggctcatcgcgttgtaatgcctccgctgacccgcatgcgcgctacccatccgggcaacattccgaacaaggagtgggctgcggtttactacggccagcgtgcacagcgtccggggacaatgattatcacggaggcgacgttcatcagcccgcaggcaggtgggtacgataacaagcctggtgtttggtcagacgaacaggtcgccgaatggaagaaaatcttcctggctattcatgactgtcagtcatttgcgtgggtgcaactgcaggtcctgggctgggccgcctttccggataccctggcgcgtgatgggttacgttacgattctgcctccgataatgtgtatatgaatgcggaacaggaggaaaaagcgaaaaaagctaacaatccgcaacatagcattactaaagacgaaattaaacaatatgtcaaagaatatgttcaggcagctaagaactcgatcgctgcgggtgcggacggcgtggaaattcactcagccaacggttatctgttaaatcagttcctggatccgcacagcaacaaccgcaccgatgagtatgggggctcaattgaaaatcgtgcacgttttactctggaagtcgttgacgcggtggttgatgccatcggcccagaaaaagtgggtttacgtctgagtccgtacggcacgttcaactctatgtcgggcggcaaagaaacgcttattgttgctcagtatgcctatgtcctgggtgagctggagcgtcgcgccaaggcggggaaacgcctggcgtttgttcatttagtcgaaccacgcgtgacagacccttggctggttgagggggagggcgaatactcagagggcactaacgattttgcttattccatttggaaaggtccgattatccgtgccggcaactatgcactacatcctgaagtagtgcgcgaacaagttaaggaccctcgcaccctgatcggctacggccgcttctttatttcaaatccagacctggtttaccgcttagaagaaggtctgccactgaacaagtatgaccgttctacgttctacaccgggagcgcggagggttacatcgactacccgacctacgaagaagccgtagatctgggctggaacaaaaac

SEQ ID NO: 338 - protein, 400 aa, synthetic construct
  REGION 1..400: note = Variant of ERED chimera of Old Yellow Enzyme
MSFVKDFKPQALRDTNLFEPIKIGNTQLAHRVVMPPLTRMRATHPGNIPNKEWAAVYYGQRAQRPGTMIITEATFISPQAGGYDNKPGVWSDEQVAEWKKIFLAIHDCQSFAWVQLQVLGWAAFPDTLARDGLRYDSASDNVYMNAEQEEKAKKANNPQHSITKDEIKQYVKEYVQAAKNSIAAGADGVEIHSANGYLLNQFLDPHSNNRTDEYGGSIENRARFTLEVVDAVVDAIGPEKVGLRLSPYGTFNSMSGGKETLIVAQYAYVLGELERRAKAGKRLAFVHLVEPRVTDPWLVEGEGEYSEGTNDFAYSIWKGPIIRAGNYALHPEVVREQVKDPRTLIGYGRFFISNPDLVYRLEEGLPLNKYDRSTFYTGSAEGYIDYPTYEEAVDLGWNKN

SEQ ID NO: 339 - DNA, 1200 bp, synthetic construct
  misc_feature 1..1200: note = Variant of ERED chimera of Old Yellow Enzyme
  source 1..1200: mol_type = other DNA
atgtctttcgttaaggactttaagccgcaagcactgcgcgacaccaacctgttcgaacctattaaaattgggaacacacagctggctcatcgcgttgtaatgcctccgctgacccgcatgcgcgctacccatccgggcaacattccgaacaaggagtgggctgcggtttactacggccagcgtgcacagcgtccggggacaatgattatcacggaggcgacgttcatcagcccgcaggcaggtgggtacgataacaagcctggtgtttggtcagacgaacaggtcgccgaatggaagaaaatcttcctggctattcatgactgtcagtcatttgcgtgggtgcaactgcaggtcctgggctgggccgcctttccggataccctggcgcgtgatgggttacgttacgattctgcctccgataatgtgtatatgaatgcggaacaggaggaaaaagcgaaaaaagctaacaatccgcaacatagcattactaaagacgaaattaaacaatatgtcaaagaatatgttcaggcagctaagaactcgatcgctgcgggtgcggacggcgtggaaattcactcagccaacggttatctgttaaatcagttcctggatccgcacagcaacaaccgcaccgatgagtatgggggctcaattgaaaatcgtgcacgttttactctggaagtcgttgacgcggtggttgatgccatcggcccagaaaaagtgggtttacgtctgagtccgtacggcacgttcaactctatgtcgggcggcaaagaaacgatgattgttgctcagtatgcctatgtcctgggtgagctggagcgtcgcgccaaggcggggaaacgcctggcgtttgttcatttagtcgaaccacgcgtgacagacccttggctggttgagggggagggcgaatactcagagggcactaacgattttgcttattccatttggaaaggtccgattatccgtgccggcaactatgcactacatcctgaagtagtgcgcgaacaagttaaggaccctcgcaccctgatcggctacggccgcttctttatttcaaatccagacctggtttaccgcttagaagaaggtctgccactgaacaagtatgaccgttctacgttctacaccgggagcgcggagggttacatcgactacccgacctacgaagaagccgtagatctgggctggaacaaaaac

SEQ ID NO: 340 - protein, 400 aa, synthetic construct
  REGION 1..400: note = Variant of ERED chimera of Old Yellow Enzyme
MSFVKDFKPQALRDTNLFEPIKIGNTQLAHRVVMPPLTRMRATHPGNIPNKEWAAVYYGQRAQRPGTMIITEATFISPQAGGYDNKPGVWSDEQVAEWKKIFLAIHDCQSFAWVQLQVLGWAAFPDTLARDGLRYDSASDNVYMNAEQEEKAKKANNPQHSITKDEIKQYVKEYVQAAKNSIAAGADGVEIHSANGYLLNQFLDPHSNNRTDEYGGSIENRARFTLEVVDAVVDAIGPEKVGLRLSPYGTFNSMSGGKETMIVAQYAYVLGELERRAKAGKRLAFVHLVEPRVTDPWLVEGEGEYSEGTNDFAYSIWKGPIIRAGNYALHPEVVREQVKDPRTLIGYGRFFISNPDLVYRLEEGLPLNKYDRSTFYTGSAEGYIDYPTYEEAVDLGWNKN

SEQ ID NO: 341 - DNA, 1200 bp, synthetic construct
  misc_feature 1..1200: note = Variant of ERED chimera of Old Yellow Enzyme
  source 1..1200: mol_type = other DNA
atgtctttcgttaaggactttaagccgcaagcactgcgcgacaccaacctgttcgaacctattaaaattgggaacacacagctggctcatcgcgttgtaatgcctccgctgacccgcatgcgcgctacccatccgggcaacattccgaacaaggagtgggctgcggtttactacggccagcgtgcacagcgtccggggacaatgattatcacggaggcgacgttcatcagcccgcaggcaggtgggtacgataacaagcctggtgtttggtcagacgaacaggtcgccgaatggaagaacatcttcctggctattcatgactgtcagtcatttgcgtgggtgcaactgcaggtcctgggctgggccgcctttccggatactctggcgcgtgatgggttacgttacgattctgcctccgataatgtgtatatgaatgcggaacaggaggaaaaagcgaaaaaagctaacaatccgcaacatagcattactaaagacgaaattaaacaatatgtcaaagaatatgttcaggcagctaagaactcgatcgctgcgggtgcggacggcgtggaaattcactcagccaacggttatctgttaaatcagttcctggatccgcacagcaacaaccgcaccgatgagtatgggggctcaattgaaaatcgtgcacgttttactctggaagtcgttgacgcggtggttgatgccatcggcccagaaaaagtgggtatccgtctgagtccgtacggcacgttcaactctatgtcgggcggcgcggaaacgtgtattgttgctcagtatgcctatgtcctgggtgagctggagcgtcgcgccaaggcggggaaacgcctggcgtttgttcatttagtcgaaccacgcgtgacagacccttggctggttgagggggagggcgaatactcagagggcactaacgattttgcttattccatttggaaaggtccgattatccgtgccggcaactatgcactacatcctgaagtagtgcgcgaacaagttaaggaccctcgcaccctgatcggctacggccgcttctttatttcaaatccagacctggtttaccgcttagaagaaggtctgccactgaacaagtatgaccgttctagtttctacacccaaagcgcggagggttacatcgactacccgacctacgaagaagccgtagatctgggctggaacaaaaac

SEQ ID NO: 342 - protein, 400 aa, synthetic construct
  REGION 1..400: note = Variant of ERED chimera of Old Yellow Enzyme
MSFVKDFKPQALRDTNLFEPIKIGNTQLAHRVVMPPLTRMRATHPGNIPNKEWAAVYYGQRAQRPGTMIITEATFISPQAGGYDNKPGVWSDEQVAEWKNIFLAIHDCQSFAWVQLQVLGWAAFPDTLARDGLRYDSASDNVYMNAEQEEKAKKANNPQHSITKDEIKQYVKEYVQAAKNSIAAGADGVEIHSANGYLLNQFLDPHSNNRTDEYGGSIENRARFTLEVVDAVVDAIGPEKVGIRLSPYGTFNSMSGGAETCIVAQYAYVLGELERRAKAGKRLAFVHLVEPRVTDPWLVEGEGEYSEGTNDFAYSIWKGPIIRAGNYALHPEVVREQVKDPRTLIGYGRFFISNPDLVYRLEEGLPLNKYDRSSFYTQSAEGYIDYPTYEEAVDLGWNKN

SEQ ID NO: 343 - DNA, 1200 bp, synthetic construct
  misc_feature 1..1200: note = Variant of ERED chimera of Old Yellow Enzyme
  source 1..1200: mol_type = other DNA
atgtctttcgttaaggactttaagccgcaagcactgcgcgacaccaacctgttcgaacctattaaaattgggaacacacagctggctcatcgcgttgtaatgcctccgctgacccgcatgcgcgctacccatccgggcaacattccgaacaaggagtgggctgcggtttactacggccagcgtgcacagcgtccggggacaatgattatcacggaggcgacgttcatcagcccgcaggcaggtgggtacgataacaagcctggtgtttggtcagacgaacaggtcgccgaatggaagaacatcttcctggctattcatgactgtcagtcatttgcgtgggtgcaactgcaggtcctgggctgggccgcctttccggatactctggcgcgtgatgggttacgttacgattctgcctccgataatgtgtatatgaatgcggaacaggaggaaaaagcgaaaaaagctaacaatccgcaacatagcattactaaagacgaaattaaacaatatgtcaaagaatatgttcaggcagctaagaactcgatcgctgcgggtgcggacggcgtggaaattcactcagccaacggttatctgttaaatcagttcctggatccgcacagcaacaaccgcaccgatgagtatgggggctcaattgaaaatcgtgcacgttttactctggaagtcgttgacgcggtggttgatgccatcggcccagaaaaagtgggtatccgtctgagtccgtacggcacgttcaactctatgtcgggcggcgcggaaacgtgtattgttgctcagtatgcctatgtcctgggtgagctggagcgtcgcgccaaggcggggaaacgcctggcgtttgttcatttagtcgaaccacgcgtgacagacccttggctggttgagggggagggcgaatactcagagggcactaacgattttgcttattccatttggaaaggtccgattatccgtgccggcaactatgcactacatcctgaagtagtgcgcgaacaagttaaggaccctcgcaccctgatcggctacggccgcttctttatttcaaatccagacctggtttaccgcttagaagaaggtctgccactgaacaagtatgaccgttctactttctacacccaaagcgcggagggttacatcgactacccgacctacgaagaagccgtagatctgggctggaacaaaaac

SEQ ID NO: 344 - protein, 400 aa, synthetic construct
  REGION 1..400: note = Variant of ERED chimera of Old Yellow Enzyme
MSFVKDFKPQALRDTNLFEPIKIGNTQLAHRVVMPPLTRMRATHPGNIPNKEWAAVYYGQRAQRPGTMIITEATFISPQAGGYDNKPGVWSDEQVAEWKNIFLAIHDCQSFAWVQLQVLGWAAFPDTLARDGLRYDSASDNVYMNAEQEEKAKKANNPQHSITKDEIKQYVKEYVQAAKNSIAAGADGVEIHSANGYLLNQFLDPHSNNRTDEYGGSIENRARFTLEVVDAVVDAIGPEKVGIRLSPYGTFNSMSGGAETCIVAQYAYVLGELERRAKAGKRLAFVHLVEPRVTDPWLVEGEGEYSEGTNDFAYSIWKGPIIRAGNYALHPEVVREQVKDPRTLIGYGRFFISNPDLVYRLEEGLPLNKYDRSTFYTQSAEGYIDYPTYEEAVDLGWNKN

SEQ ID NO: 345 - DNA, 1200 bp, synthetic construct
  misc_feature 1..1200: note = Variant of ERED chimera of Old Yellow Enzyme
  source 1..1200: mol_type = other DNA
atgtctttcgttaaggactttaagccgcaagcactgcgcgacaccaacctgttcgaacctattaaaattgggaacacacagctggctcatcgcgttgtaatgcctccgctgacccgcatgcgcgctacccatccgggccatattccgaacaaggagtgggctgcggtttactacggccagcgtgcacagcgtccggggacaatgattatcacggaggcgacgttcatcagcccgcaggcaggtgggtacgataacaagcctggtatttggtcagacgaacagattgccgaatggaagaaaatcttcctggctattcatgactgtcagtcatttgcgtgggtgcaactgcaggtcctgggctgggccgcctttccggataccctggcgcgtgatgggttacgttacgattctgcctccgataatgtgtatatgaatgcggaactggaggaaaaagcgaaaaaagctaacaatccgcaacatagcattactaaagacgaaattaaacaatatgtcaaagaatatgttcaggcagctaagaactcgatcgctgcgggtgcggacggcgtggaaattcactcagccaacggttatctgttaaatcagttcctggatccgcacagcaacaaccgcaccgatgagtatgggggctcaattgaaaatcgtgcacgttttactctggaagtcgttgacgcggtggttgatgccatcggcccagaaaaagtgggtttacgtctgagtccgtacggcacgttcaactctatgtcgggcggcaaagaaacggtgattgttgctcagtatgcctatgtcctgggtgagctggagcgtcgcgccaaggcggggaaacgcctggcgtttgttcatttagtcgaaccacgcgtgacagacccttggctggttgagggggagggcgaatactcagagggcactaacgattttgcttattccatttggaaaggtccgattatccgtgccggcaactatgcactacatcctgaagtagtgcgcgaacaagttaaggaccctcgcaccctgatcggctacggccgcttctttatttcaaatccagacctggtttaccgcttagaagaaggtctgccactgaacaagtatgaccgttctagtttctacacccaaagcgcggagggttacatcgactacccaacctacgaagaagccgtagatctgggctggaacaaaaac

SEQ ID NO: 346 - protein, 400 aa, synthetic construct
  REGION 1..400: note = Variant of ERED chimera of Old Yellow Enzyme
MSFVKDFKPQALRDTNLFEPIKIGNTQLAHRVVMPPLTRMRATHPGHIPNKEWAAVYYGQRAQRPGTMIITEATFISPQAGGYDNKPGIWSDEQIAEWKKIFLAIHDCQSFAWVQLQVLGWAAFPDTLARDGLRYDSASDNVYMNAELEEKAKKANNPQHSITKDEIKQYVKEYVQAAKNSIAAGADGVEIHSANGYLLNQFLDPHSNNRTDEYGGSIENRARFTLEVVDAVVDAIGPEKVGLRLSPYGTFNSMSGGKETVIVAQYAYVLGELERRAKAGKRLAFVHLVEPRVTDPWLVEGEGEYSEGTNDFAYSIWKGPIIRAGNYALHPEVVREQVKDPRTLIGYGRFFISNPDLVYRLEEGLPLNKYDRSSFYTQSAEGYIDYPTYEEAVDLGWNKN

SEQ ID NO: 347 - DNA, 1200 bp, synthetic construct
  misc_feature 1..1200: note = Variant of ERED chimera of Old Yellow Enzyme
  source 1..1200: mol_type = other DNA
atgtctttcgttaaggactttaagccgcaagcactgcgcgacaccaacctgttcgaacctattaaaattgggaacacacagctggctcatcgcgttgtaatgcctccgctgacccgcatgcgcgctacccatccgggcaacattccgaacaaggagtgggctgcggtttactacggccagcgtgcacagcgtccggggacaatgattatcacggaggcgacgttcatcagcccgcaggcaggtgggtacgataacaagcctggtgtttggtcagacgaacagattgccgaatggaagaaaatcttcctggctattcatgactgtcagtcatttgcgtgggtgcaactgcaggtcctgggctgggccgcctttccggataccctggcgcgtgatgggttacgttacgattctgcctccgataatgtgtatatgaatgcggaactggaggaaaaagcgaaaaaagctaacaatccgcaacatagcattactaaagacgaaattaaacaatatgtcaaagaatatgttcaggcagctaagaactcgatcgctgcgggtgcggacggcgtggaaattcactcagccaacggttatctgttaaatcagttcctggatccgcacagcaacaaccgcaccgatgagtatgggggctcaattgaaaatcgtgcacgttttactctggaagtcgttgacgcggtggttgatgccatcggcccagaaaaagtgggtctgcgtctgagtccgtacggcacgttcaactctatgtcgggcggcaaagaaacggtgattgttgctcagtatgcctatgtcctgggtgagctggagcgtcgcgccaaggcggggaaacgcctggcgtttgttcatttagtcgaaccacgcgtgacagacccttggctggttgagggggagggcgaatactcagagggcactaacgattttgcttattccatttggaaaggtccgattatccgtgccggcaactatgcactacatcctgaagtagtgcgcgaacaagttaaggaccctcgcaccctgatcggctacggccgcttctttatttcaaatccagacctggtttaccgcttagaagaaggtctgccactgaacaagtatgaccgttctagtttctacacccaaagcgcggagggttacatcgactacccgacctacgaagaagccgtagatctgggctggaacaaaaac

SEQ ID NO: 348 - protein, 400 aa, synthetic construct
  REGION 1..400: note = Variant of ERED chimera of Old Yellow Enzyme
MSFVKDFKPQALRDTNLFEPIKIGNTQLAHRVVMPPLTRMRATHPGNIPNKEWAAVYYGQRAQRPGTMIITEATFISPQAGGYDNKPGVWSDEQIAEWKKIFLAIHDCQSFAWVQLQVLGWAAFPDTLARDGLRYDSASDNVYMNAELEEKAKKANNPQHSITKDEIKQYVKEYVQAAKNSIAAGADGVEIHSANGYLLNQFLDPHSNNRTDEYGGSIENRARFTLEVVDAVVDAIGPEKVGLRLSPYGTFNSMSGGKETVIVAQYAYVLGELERRAKAGKRLAFVHLVEPRVTDPWLVEGEGEYSEGTNDFAYSIWKGPIIRAGNYALHPEVVREQVKDPRTLIGYGRFFISNPDLVYRLEEGLPLNKYDRSSFYTQSAEGYIDYPTYEEAVDLGWNKN

SEQ ID NO: 349 - DNA, 1200 bp, synthetic construct
  misc_feature 1..1200: note = Variant of ERED chimera of Old Yellow Enzyme
  source 1..1200: mol_type = other DNA
atgtctttcgttaaggactttaagccgcaagcactgcgcgacaccaacctgttcgaacctattaaaattgggaacacacagctggctcatcgcgttgtaatgcctccgctgacccgcatgcgcgctacccatccgggcaatattccgaacaaggagtgggctgcggtttactacggccagcgtgcacagcgtccggggacaatgattatcacggaggcgacgttcatcagcccgcaggcaggtgggtacgataacaagcctggtgtttggtcagacgaacagattgccgaatggaagaaaatcttcctggctattcatgactgtcagtcatttgcgtgggtgcaactgcaggtcctgggctgggccgcctttccggataccctggcgcgtgatgggttacgttacgattctgcctccgataatgtgtatatgaatgcggaactggaggaaaaagcgaaaaaagctaacaatccgcaacatagcattactaaagacgaaattaaacaatatgtcaaagaatatgttcaggcagctaagaactcgatcgctgcgggtgcggacggcgtggaaattcactcagccaacggttatctgttaaatcagttcctggatccgcacagcaacaaccgcaccgatgagtatgggggctcaattgaaaatcgtgcacgttttactctggaagtcgttgacgcggtggttgatgccatcggcccagaaaaagtgggtctgcgtctgagtccgtacggcacgttcaactctatgtcgggcggcgctgaaacgtgcattgttgctcagtatgcctatgtcctgggtgagctggagcgtcgcgccaaggcggggaaacgcctggcgtttgttcatttagtcgaaccacgcgtgacagacccttggctggttgagggggagggcgaatactcagagggcactaacgattttgcttattccatttggaaaggtccgattatccgtgccggcaactatgcactacatcctgaagtagtgcgcgaacaagttaaggaccctcgcaccctgatcggctacggccgcttctttatttcaaatccagacctggtttaccgcttagaagaaggtctgccactgaacaagtatgaccgttctagtttctacacccaaagcgcggagggttacatcgactacccgacctacgaagaagccgtagatctgggctggaacaaaaac

SEQ ID NO: 350 - protein, 400 aa, synthetic construct
  REGION 1..400: note = Variant of ERED chimera of Old Yellow Enzyme
MSFVKDFKPQALRDTNLFEPIKIGNTQLAHRVVMPPLTRMRATHPGNIPNKEWAAVYYGQRAQRPGTMIITEATFISPQAGGYDNKPGVWSDEQIAEWKKIFLAIHDCQSFAWVQLQVLGWAAFPDTLARDGLRYDSASDNVYMNAELEEKAKKANNPQHSITKDEIKQYVKEYVQAAKNSIAAGADGVEIHSANGYLLNQFLDPHSNNRTDEYGGSIENRARFTLEVVDAVVDAIGPEKVGLRLSPYGTFNSMSGGAETCIVAQYAYVLGELERRAKAGKRLAFVHLVEPRVTDPWLVEGEGEYSEGTNDFAYSIWKGPIIRAGNYALHPEVVREQVKDPRTLIGYGRFFISNPDLVYRLEEGLPLNKYDRSSFYTQSAEGYIDYPTYEEAVDLGWNKN

SEQ ID NO: 351 - DNA, 1200 bp, synthetic construct
  misc_feature 1..1200: note = Variant of ERED chimera of Old Yellow Enzyme
  source 1..1200: mol_type = other DNA
atgtctttcgttaaggactttaagccgcaagcactgcgcgacaccaacctgttcgaacctattaaaattgggaacacacagctggctcatcgcgttgtaatgcctccgctgacccgcatgcgcgctacccatccgggcaatattccgaacaaggagtgggctgcggtttactacggccagcgtgcacagcgtccggggacaatgattatcacggaggcgacgttcatcagcccgcaggcaggtgggtacgataacaagcctggtgtttggtcagacgaacagattgccgaatggaagaaaatcttcctggctattcatgactgtcagtcatttgcgtgggtgcaactgcaggtcctgggctgggccgcctttccggataccctggcgcgtgatgggttacgttacgattctgcctccgataatgtgtatatgaatgcggaacaggaggaaaaagcgaaaaaagctaacaatccgcaacatagcattactaaagacgaaattaaacaatatgtcaaagaatatgttcaggcagctaagaactcgatcgctgcgggtgcggacggcgtggaaattcactcagccaacggttatctgttaaatcagttcctggatccgcacagcaacaaccgcaccgatgagtatgggggctcaattgaaaatcgtgcacgttttactctggaagtcgttgacgcggtggttgatgccatcggcccagaaaaagtgggtatccgtctgagtccgtacggcacgttcaactctatgtcgggcggcgctgaaacgtgcattgttgctcagtatgcctatgtcctgggtgagctggagcgtcgcgccaaggcggggaaacgcctggcgtttgttcatttagtcgaaccacgcgtgacagacccttggctggttgagggggagggcgaatactcagagggcactaacgattttgcttattccatttggaaaggtccgattatccgtgccggcaactatgcactacatcctgaagtagtgcgcgaacaagttaaggaccctcgcaccctgatcggctacggccgcttctttatttcaaatccagacctggtttaccgcttagaagaaggtctgccactgaacaagtatgaccgttctagtttctacacccaaagcgcggagggttacatcgactacccaacctacgaagaagccgtagatctgggctggaacaaaaac

SEQ ID NO: 352 - protein, 400 aa, synthetic construct
  REGION 1..400: note = Variant of ERED chimera of Old Yellow Enzyme
MSFVKDFKPQALRDTNLFEPIKIGNTQLAHRVVMPPLTRMRATHPGNIPNKEWAAVYYGQRAQRPGTMIITEATFISPQAGGYDNKPGVWSDEQIAEWKKIFLAIHDCQSFAWVQLQVLGWAAFPDTLARDGLRYDSASDNVYMNAEQEEKAKKANNPQHSITKDEIKQYVKEYVQAAKNSIAAGADGVEIHSANGYLLNQFLDPHSNNRTDEYGGSIENRARFTLEVVDAVVDAIGPEKVGIRLSPYGTFNSMSGGAETCIVAQYAYVLGELERRAKAGKRLAFVHLVEPRVTDPWLVEGEGEYSEGTNDFAYSIWKGPIIRAGNYALHPEVVREQVKDPRTLIGYGRFFISNPDLVYRLEEGLPLNKYDRSSFYTQSAEGYIDYPTYEEAVDLGWNKN

SEQ ID NO: 353 - DNA, 1200 bp, synthetic construct
  misc_feature 1..1200: note = Variant of ERED chimera of Old Yellow Enzyme
  source 1..1200: mol_type = other DNA
atgtctttcgttaaggactttaagccgcaagcactgcgcgacaccaacctgttcgaacctattaaaattgggaacacacagctggctcatcgcgttgtaatgcctccgctgacccgcatgcgcgctacccatccgggccatattccgaacaaggagtgggctgcggtttactacggccagcgtgcacagcgtccggggacaatgattatcacggaggcgacgttcatcagcccgcaggcaggtgggtacgataacaagcctggtatttggtcagacgaacaggttgccgaatggaagaaaatcttcctggctattcatgactgtcagtcatttgcgtgggtgcaactgcaggtcctgggctgggccgcctttccggataccctggcgcgtgatgggttacgttacgattctgcctccgataatgtgtatatgaatgcggaacaggaggaaaaagcgaaaaaagctaacaatccgcaacatagcattactaaagacgaaattaaacaatatgtcaaagaatatgttcaggcagctaagaactcgatcgctgcgggtgcggacggcgtggaaattcactcagccaacggttatctgttaaatcagttcctggatccgcacagcaacaaccgcaccgatgagtatgggggctcaattgaaaatcgtgcacgttttactctggaagtcgttgacgcggtggttgatgccatcggcccagaaaaagtgggtctgcgtctgagtccgtacggcacgttcaactctatgtcgggcggcaaagaaacgtgcattgttgctcagtatgcctatgtcctgggtgagctggagcgtcgcgccaaggcggggaaacgcctggcgtttgttcatttagtcgaaccacgcgtgacagacccttggctggttgagggggagggcgaatactcagagggcactaacgattttgcttattccatttggaaaggtccgattatccgtgccggcaactatgcactacatcctgaagtagtgcgcgaacaagttaaggaccctcgcaccctgatcggctacggccgcttctttatttcaaatccagacctggtttaccgcttagaagaaggtctgccactgaacaagtatgaccgttctagtttctacacccaaagcgcggagggttacatcgactacccaacctacgaagaagccgtagatctgggctggaacaaaaac

SEQ ID NO: 354 - protein, 400 aa, synthetic construct
  REGION 1..400: note = Variant of ERED chimera of Old Yellow Enzyme
MSFVKDFKPQALRDTNLFEPIKIGNTQLAHRVVMPPLTRMRATHPGHIPNKEWAAVYYGQRAQRPGTMIITEATFISPQAGGYDNKPGIWSDEQVAEWKKIFLAIHDCQSFAWVQLQVLGWAAFPDTLARDGLRYDSASDNVYMNAEQEEKAKKANNPQHSITKDEIKQYVKEYVQAAKNSIAAGADGVEIHSANGYLLNQFLDPHSNNRTDEYGGSIENRARFTLEVVDAVVDAIGPEKVGLRLSPYGTFNSMSGGKETCIVAQYAYVLGELERRAKAGKRLAFVHLVEPRVTDPWLVEGEGEYSEGTNDFAYSIWKGPIIRAGNYALHPEVVREQVKDPRTLIGYGRFFISNPDLVYRLEEGLPLNKYDRSSFYTQSAEGYIDYPTYEEAVDLGWNKN

SEQ ID NO: 355 - DNA, 1200 bp, synthetic construct
  misc_feature 1..1200: note = Variant of ERED chimera of Old Yellow Enzyme
  source 1..1200: mol_type = other DNA
atgtctttcgttaaggactttaagccgcaagcactgcgcgacaccaacctgttcgaacctattaaaattgggaacacacagctggctcatcgcgttgtaatgcctccgctgacccgcatgcgcgctacccatccgggccatattccgaacaaggagtgggctgcggtttactacggccagcgtgcacagcgtccggggacaatgattatcacggaggcgacgttcatcagcccgcaggcaggtgggtacgataacaagcctggtgtttggtcagacgaacagattgccgaatggaagaaaatcttcctggctattcatgactgtcagtcatttgcgtgggtgcaactgcaggtcctgggctgggccgcctttccggataccctggcgcgtgatgggttacgttacgattctgcctccgataatgtgtatatgaatgcggaacaggaggaaaaagcgaaaaaagctaacaatccgcaacatagcattactaaagacgaaattaaacaatatgtcaaagaatatgttcaggcagctaagaactcgatcgctgcgggtgcggacggcgtggaaattcactcagccaacggttatctgttaaatcagttcctggatccgcacagcaacaaccgcaccgatgagtatgggggctcaattgaaaatcgtgcacgttttactctggaagtcgttgacgcggtggttgatgccatcggcccagaaaaagtgggtctgcgtctgagtccgtacggcacgttcaactctatgtcgggcggcgctgaaacgtgcattgttgctcagtatgcctatgtcctgggtgagctggagcgtcgcgccaaggcggggaaacgcctggcgtttgttcatttagtcgaaccacgcgtgacagacccttggctggttgagggggagggcgaatactcagagggcactaacgattttgcttattccatttggaaaggtccgattatccgtgccggcaactatgcactacatcctgaagtagtgcgcgaacaagttaaggaccctcgcaccctgatcggctacggccgcttctttatttcaaatccagacctggtttaccgcttagaagaaggtctgccactgaacaagtatgaccgttctagtttctacacccagagcgcggagggttacatcgactacccaacctacgaagaagccgtagatctgggctggaacaaaaac

SEQ ID NO: 356 - protein, 400 aa, synthetic construct
  REGION 1..400: note = Variant of ERED chimera of Old Yellow Enzyme
MSFVKDFKPQALRDTNLFEPIKIGNTQLAHRVVMPPLTRMRATHPGHIPNKEWAAVYYGQRAQRPGTMIITEATFISPQAGGYDNKPGVWSDEQIAEWKKIFLAIHDCQSFAWVQLQVLGWAAFPDTLARDGLRYDSASDNVYMNAEQEEKAKKANNPQHSITKDEIKQYVKEYVQAAKNSIAAGADGVEIHSANGYLLNQFLDPHSNNRTDEYGGSIENRARFTLEVVDAVVDAIGPEKVGLRLSPYGTFNSMSGGAETCIVAQYAYVLGELERRAKAGKRLAFVHLVEPRVTDPWLVEGEGEYSEGTNDFAYSIWKGPIIRAGNYALHPEVVREQVKDPRTLIGYGRFFISNPDLVYRLEEGLPLNKYDRSSFYTQSAEGYIDYPTYEEAVDLGWNKN

SEQ ID NO: 357 - DNA, 1200 bp, synthetic construct
  misc_feature 1..1200: note = Variant of ERED chimera of Old Yellow Enzyme
  source 1..1200: mol_type = other DNA
atgtctttcgttaaggactttaagccgcaagcactgcgcgacaccaacctgttcgaacctattaaaattgggaacacacagctggctcatcgcgttgtaatgcctccgctgacccgcatgcgcgctacccatccgggcaatattccgaacaaggagtgggctgcggtttactacggccagcgtgcacagcgtccggggacaatgattatcacggaggcgacgttcatcagcccgcaggcaggtgggtacgataacaagcctggtgtttggtcagacgaacagattgccgaatggaagaaaatcttcctggctattcatgactgtcagtcatttgcgtgggtgcaactgcaggtcctgggctgggccgcctttccggataccctggcgcgtgatgggttacgttacgattctgcctccgataatgtgtatatgaatgcggaactggaggaaaaagcgaaaaaagctaacaatccgcaacatagcattactaaagacgaaattaaacaatatgtcaaagaatatgttcaggcagctaagaactcgatcgctgcgggtgcggacggcgtggaaattcactcagccaacggttatctgttaaatcagttcctggatccgcacagcaacaaccgcaccgatgagtatgggggctcaattgaaaatcgtgcacgttttactctggaagtcgttgacgcggtggttgatgccatcggcccagaaaaagtgggtatccgtctgagtccgtacggcacgttcaactctatgtcgggcggcaaagaaacggtgattgttgctcagtatgcctatgtcctgggtgagctggagcgtcgcgccaaggcggggaaacgcctggcgtttgttcatttagtcgaaccacgcgtgacagacccttggctggttgagggggagggcgaatactcagagggcactaacgattttgcttattccatttggaaaggtccgattatccgtgccggcaactatgcactacatcctgaagtagtgcgcgaacaagttaaggaccctcgcaccctgatcggctacggccgcttctttatttcaaatccagacctggtttaccgcttagaagaaggtctgccactgaacaagtatgaccgttctagtttctacacccaaagcgcggagggttacatcgactacccaacctacgaagaagccgtagatctgggctggaacaaaaac

SEQ ID NO: 358 - protein, 400 aa, synthetic construct
  REGION 1..400: note = Variant of ERED chimera of Old Yellow Enzyme
MSFVKDFKPQALRDTNLFEPIKIGNTQLAHRVVMPPLTRMRATHPGNIPNKEWAAVYYGQRAQRPGTMIITEATFISPQAGGYDNKPGVWSDEQIAEWKKIFLAIHDCQSFAWVQLQVLGWAAFPDTLARDGLRYDSASDNVYMNAELEEKAKKANNPQHSITKDEIKQYVKEYVQAAKNSIAAGADGVEIHSANGYLLNQFLDPHSNNRTDEYGGSIENRARFTLEVVDAVVDAIGPEKVGIRLSPYGTFNSMSGGKETVIVAQYAYVLGELERRAKAGKRLAFVHLVEPRVTDPWLVEGEGEYSEGTNDFAYSIWKGPIIRAGNYALHPEVVREQVKDPRTLIGYGRFFISNPDLVYRLEEGLPLNKYDRSSFYTQSAEGYIDYPTYEEAVDLGWNKN

SEQ ID NO: 359 - DNA, 1200 bp, synthetic construct
  misc_feature 1..1200: note = Variant of ERED chimera of Old Yellow Enzyme
  source 1..1200: mol_type = other DNA
atgtctttcgttaaggactttaagccgcaagcactgcgcgacaccaacctgttcgaacctattaaaattgggaacacacagctggctcatcgcgttgtaatgcctccgctgacccgcatgcgcgctacccatccgggcaatattccgaacaaggagtgggctgcggtttactacggccagcgtgcacagcgtccggggacaatgattatcacggaggcgacgttcatcagcccgcaggcaggtgggtacgataacaagcctggtatttggtcagacgaacagattgccgaatggaagaaaatcttcctggctattcatgactgtcagtcatttgcgtgggtgcaactgcaggtcctgggctgggccgcctttccggataccctggcgcgtgatgggttacgttacgattctgcctccgataatgtgtatatgaatgcggaacaggaggaaaaagcgaaaaaagctaacaatccgcaacatagcattactaaagacgaaattaaacaatatgtcaaagaatatgttcaggcagctaagaactcgatcgctgcgggtgcggacggcgtggaaattcactcagccaacggttatctgttaaatcagttcctggatccgcacagcaacaaccgcaccgatgagtatgggggctcaattgaaaatcgtgcacgttttactctggaagtcgttgacgcggtggttgatgccatcggcccagaaaaagtgggtatccgtctgagtccgtacggcacgttcaactctatgtcgggcggcgctgaaacgtgcattgttgctcagtatgcctatgtcctgggtgagctggagcgtcgcgccaaggcggggaaacgcctggcgtttgttcatttagtcgaaccacgcgtgacagacccttggctggttgagggggagggcgaatactcagagggcactaacgattttgcttattccatttggaaaggtccgattatccgtgccggcaactatgcactacatcctgaagtagtgcgcgaacaagttaaggaccctcgcaccctgatcggctacggccgcttctttatttcaaatccagacctggtttaccgcttagaagaaggtctgccactgaacaagtatgaccgttctagtttctacacccaaagcgcggagggttacatcgactacccaacctacgaagaagccgtagatctgggctggaacaaaaac

SEQ ID NO: 360 - protein, 400 aa, synthetic construct
  REGION 1..400: note = Variant of ERED chimera of Old Yellow Enzyme
MSFVKDFKPQALRDTNLFEPIKIGNTQLAHRVVMPPLTRMRATHPGNIPNKEWAAVYYGQRAQRPGTMIITEATFISPQAGGYDNKPGIWSDEQIAEWKKIFLAIHDCQSFAWVQLQVLGWAAFPDTLARDGLRYDSASDNVYMNAEQEEKAKKANNPQHSITKDEIKQYVKEYVQAAKNSIAAGADGVEIHSANGYLLNQFLDPHSNNRTDEYGGSIENRARFTLEVVDAVVDAIGPEKVGIRLSPYGTFNSMSGGAETCIVAQYAYVLGELERRAKAGKRLAFVHLVEPRVTDPWLVEGEGEYSEGTNDFAYSIWKGPIIRAGNYALHPEVVREQVKDPRTLIGYGRFFISNPDLVYRLEEGLPLNKYDRSSFYTQSAEGYIDYPTYEEAVDLGWNKN

SEQ ID NO: 361 - DNA, 1200 bp, synthetic construct
  misc_feature 1..1200: note = Variant of ERED chimera of Old Yellow Enzyme
  source 1..1200: mol_type = other DNA
atgtctttcgttaaggactttaagccgcaagcactgcgcgacaccaacctgttcgaacctattaaaattgggaacacacagctggctcatcgcgttgtaatgcctccgctgacccgcatgcgcgctacccatccgggcaatattccgaacaaggagtgggctgcggtttactacggccagcgtgcacagcgtccggggacaatgattatcacggaggcgacgttcatcagcccgcaggcaggtgggtacgataacaagcctggtgtttggtcagacgaacagattgccgaatggaagaaaatcttcctggctattcatgactgtcagtcatttgcgtgggtgcaactgcaggtcctgggctgggccgcctttccggataccctggcgcgtgatgggttacgttacgattctgcctccgataatgtgtatatgaatgcggaactggaggaaaaagcgaaaaaagctaacaatccgcaacatagcattactaaagacgaaattaaacaatatgtcaaagaatatgttcaggcagctaagaactcgatcgctgcgggtgcggacggcgtggaaattcactcagccaacggttatctgttaaatcagttcctggatccgcacagcaacaaccgcaccgatgagtatgggggctcaattgaaaatcgtgcacgttttactctggaagtcgttgacgcggtggttgatgccatcggcccagaaaaagtgggtatccgtctgagtccgtacggcacgttcaactctatgtcgggcggcgctgaaacggtgattgttgctcagtatgcctatgtcctgggtgagctggagcgtcgcgccaaggcggggaaacgcctggcgtttgttcatttagtcgaaccacgcgtgacagacccttggctggttgagggggagggcgaatactcagagggcactaacgattttgcttattccatttggaaaggtccgattatccgtgccggcaactatgcactacatcctgaagtagtgcgcgaacaagttaaggaccctcgcaccctgatcggctacggccgcttctttatttcaaatccagacctggtttaccgcttagaagaaggtctgccactgaacaagtatgaccgttctagtttctacacccaaagcgcggagggttacatcgactacccaacctacgaagaagccgtagatctgggctggaacaaaaac

SEQ ID NO: 362 - protein, 400 aa, synthetic construct
  REGION 1..400: note = Variant of ERED chimera of Old Yellow Enzyme
MSFVKDFKPQALRDTNLFEPIKIGNTQLAHRVVMPPLTRMRATHPGNIPNKEWAAVYYGQRAQRPGTMIITEATFISPQAGGYDNKPGVWSDEQIAEWKKIFLAIHDCQSFAWVQLQVLGWAAFPDTLARDGLRYDSASDNVYMNAELEEKAKKANNPQHSITKDEIKQYVKEYVQAAKNSIAAGADGVEIHSANGYLLNQFLDPHSNNRTDEYGGSIENRARFTLEVVDAVVDAIGPEKVGIRLSPYGTFNSMSGGAETVIVAQYAYVLGELERRAKAGKRLAFVHLVEPRVTDPWLVEGEGEYSEGTNDFAYSIWKGPIIRAGNYALHPEVVREQVKDPRTLIGYGRFFISNPDLVYRLEEGLPLNKYDRSSFYTQSAEGYIDYPTYEEAVDLGWNKN

SEQ ID NO: 363 - DNA, 1200 bp, synthetic construct
  misc_feature 1..1200: note = Variant of ERED chimera of Old Yellow Enzyme
  source 1..1200: mol_type = other DNA
atgtctttcgttaaggactttaagccgcaagcactgcgcgacaccaacctgttcgaacctattaaaattgggaacacacagctggctcatcgcgttgtaatgcctccgctgacccgcatgcgcgctacccatccgggcaatattccgaacaaggagtgggctgcggtttactacggccagcgtgcacagcgtccggggacaatgattatcacggaggcgacgttcatcagcccgcaggcaggtgggtacgataacaagcctggtgtttggtcagacgaacaggtcgccgaatggaagaaaatcttcctggctattcatgactgtcagtcatttgcgtgggtgcaactgcaggtcctgggctgggccgcctttccggataccctggcgcgtgatgggttacgttacgattctgcctccgataatgtgtatatgaatgcggaactggaggaaaaagcgaaaaaagctaacaatccgcaacatagcattactaaagacgaaattaaacaatatgtcaaagaatatgttcaggcagctaagaactcgatcgctgcgggtgcggacggcgtggaaattcactcagccaacggttatctgttaaatcagttcctggatccgcacagcaacaaccgcaccgatgagtatgggggctcaattgaaaatcgtgcacgttttactctggaagtcgttgacgcggtggttgatgccatcggcccagaaaaagtgggtatccgtctgagtccgtacggcacgttcaactctatgtcgggcggcgctgaaacgtgcattgttgctcagtatgcctatgtcctgggtgagctggagcgtcgcgccaaggcggggaaacgcctggcgtttgttcatttagtcgaaccacgcgtgacagacccttggctggttgagggggagggcgaatactcagagggcactaacgattttgcttattccatttggaaaggtccgattatccgtgccggcaactatgcactacatcctgaagtagtgcgcgaacaagttaaggaccctcgcaccctgatcggctacggccgcttctttatttcaaatccagacctggtttaccgcttagaagaaggtctgccactgaacaagtatgaccgttctagtttctacacccaaagcgcggagggttacatcgactacccaacctacgaagaagccgtagatctgggctggaacaaaaac

SEQ ID NO: 364 - protein, 400 aa, synthetic construct
  REGION 1..400: note = Variant of ERED chimera of Old Yellow Enzyme
MSFVKDFKPQALRDTNLFEPIKIGNTQLAHRVVMPPLTRMRATHPGNIPNKEWAAVYYGQRAQRPGTMIITEATFISPQAGGYDNKPGVWSDEQVAEWKKIFLAIHDCQSFAWVQLQVLGWAAFPDTLARDGLRYDSASDNVYMNAELEEKAKKANNPQHSITKDEIKQYVKEYVQAAKNSIAAGADGVEIHSANGYLLNQFLDPHSNNRTDEYGGSIENRARFTLEVVDAVVDAIGPEKVGIRLSPYGTFNSMSGGAETCIVAQYAYVLGELERRAKAGKRLAFVHLVEPRVTDPWLVEGEGEYSEGTNDFAYSIWKGPIIRAGNYALHPEVVREQVKDPRTLIGYGRFFISNPDLVYRLEEGLPLNKYDRSSFYTQSAEGYIDYPTYEEAVDLGWNKN

SEQ ID NO: 365 - DNA, 1200 bp, synthetic construct
  misc_feature 1..1200: note = Variant of ERED chimera of Old Yellow Enzyme
  source 1..1200: mol_type = other DNA
atgtctttcgttaaggactttaagccgcaagcactgcgcgacaccaacctgttcgaacctattaaaattgggaacacacagctggctcatcgcgttgtaatgcctccgctgacccgcatgcgcgctacccatccgggccatattccgaacaaggagtgggctgcggtttactacggccagcgtgcacagcgtccggggacaatgattatcacggaggcgacgttcatcagcccgcaggcaggtgggtacgataacaagcctggtatttggtcagacgaacagattgccgaatggaagaaaatcttcctggctattcatgactgtcagtcatttgcgtgggtgcaactgcaggtcctgggctgggccgcctttccggataccctggcgcgtgatgggttacgttacgattctgcctccgataatgtgtatatgaatgcggaacaggaggaaaaagcgaaaaaagctaacaatccgcaacatagcattactaaagacgaaattaaacaatatgtcaaagaatatgttcaggcagctaagaactcgatcgctgcgggtgcggacggcgtggaaattcactcagccaacggttatctgttaaatcagttcctggatccgcacagcaacaaccgcaccgatgagtatgggggctcaattgaaaatcgtgcacgttttactctggaagtcgttgacgcggtggttgatgccatcggcccagaaaaagtgggtatccgtctgagtccgtacggcacgttcaactctatgtcgggcggcaaagaaacgctgattgttgctcagtatgcctatgtcctgggtgagctggagcgtcgcgccaaggcggggaaacgcctggcgtttgttcatttagtcgaaccacgcgtgacagacccttggctggttgagggggagggcgaatactcagagggcactaacgattttgcttattccatttggaaaggtccgattatccgtgccggcaactatgcactacatcctgaagtagtgcgcgaacaagttaaggaccctcgcaccctgatcggctacggccgcttctttatttcaaatccagacctggtttaccgcttagaagaaggtctgccactgaacaagtatgaccgttctagtttctacaccccaagcgcggagggttacatcgactacccaacctacgaagaagccgtagatctgggctggaacaaaaac

SEQ ID NO: 366 - protein, 400 aa, synthetic construct
  REGION 1..400: note = Variant of ERED chimera of Old Yellow Enzyme
MSFVKDFKPQALRDTNLFEPIKIGNTQLAHRVVMPPLTRMRATHPGHIPNKEWAAVYYGQRAQRPGTMIITEATFISPQAGGYDNKPGIWSDEQIAEWKKIFLAIHDCQSFAWVQLQVLGWAAFPDTLARDGLRYDSASDNVYMNAEQEEKAKKANNPQHSITKDEIKQYVKEYVQAAKNSIAAGADGVEIHSANGYLLNQFLDPHSNNRTDEYGGSIENRARFTLEVVDAVVDAIGPEKVGIRLSPYGTFNSMSGGKETLIVAQYAYVLGELERRAKAGKRLAFVHLVEPRVTDPWLVEGEGEYSEGTNDFAYSIWKGPIIRAGNYALHPEVVREQVKDPRTLIGYGRFFISNPDLVYRLEEGLPLNKYDRSSFYTPSAEGYIDYPTYEEAVDLGWNKN

SEQ ID NO: 367 - DNA, 1200 bp, synthetic construct
  misc_feature 1..1200: note = Variant of ERED chimera of Old Yellow Enzyme
  source 1..1200: mol_type = other DNA
atgtctttcgttaaggactttaagccgcaagcactgcgcgacaccaacctgttcgaacctattaaaattgggaacacacagctggctcatcgcgttgtaatgcctccgctgacccgcatgcgcgctacccatccgggccatattccgaacaaggagtgggctgcggtttactacggccagcgtgcacagcgtccggggacaatgattatcacggaggcgacgttcatcagcccgcaggcaggtgggtacgataacaagcctggtatttggtcagacgaacagattgccgaatggaagaaaatcttcctggctattcatgactgtcagtcatttgcgtgggtgcaactgcaggtcctgggctgggccgcctttccggataccctggcgcgtgatgggttacgttacgattctgcctccgataatgtgtatatgaatgcggaactggaggaaaaagcgaaaaaagctaacaatccgcaacatagcattactaaagacgaaattaaacaatatgtcaaagaatatgttcaggcagctaagaactcgatcgctgcgggtgcggacggcgtggaaattcactcagccaacggttatctgttaaatcagttcctggatccgcacagcaacaaccgcaccgatgagtatgggggctcaattgaaaatcgtgcacgttttactctggaagtcgttgacgcggtggttgatgccatcggcccagaaaaagtgggtttacgtctgagtccgtacggcacgttcaactctatgtcgggcggcaaagaaacggtgattgttgctcagtatgcctatgtcctgggtgagctggagcgtcgcgccaaggcggggaaacgcctggcgtttgttcatttagtcgaaccacgcgtgacagacccttggctggttgagggggagggcgaatactcagagggcactaacgattttgcttattccatttggaaaggtccgattatccgtgccggcaactatgcactacatcctgaagtagtgcgcgaacaagttaaggaccctcgcaccctgatcggctacggccgcttctttatttcaaatccagacctggtttaccgcttagaagaaggtctgccactgaacaagtatgaccgttctagtttctacacccaaagcgcggagggttacatcgactacccagggtacgaagaagccgtagatctgggctggaacaaaaac

SEQ ID NO: 368 - protein, 400 aa, synthetic construct
  REGION 1..400: note = Variant of ERED chimera of Old Yellow Enzyme
MSFVKDFKPQALRDTNLFEPIKIGNTQLAHRVVMPPLTRMRATHPGHIPNKEWAAVYYGQRAQRPGTMIITEATFISPQAGGYDNKPGIWSDEQIAEWKKIFLAIHDCQSFAWVQLQVLGWAAFPDTLARDGLRYDSASDNVYMNAELEEKAKKANNPQHSITKDEIKQYVKEYVQAAKNSIAAGADGVEIHSANGYLLNQFLDPHSNNRTDEYGGSIENRARFTLEVVDAVVDAIGPEKVGLRLSPYGTFNSMSGGKETVIVAQYAYVLGELERRAKAGKRLAFVHLVEPRVTDPWLVEGEGEYSEGTNDFAYSIWKGPIIRAGNYALHPEVVREQVKDPRTLIGYGRFFISNPDLVYRLEEGLPLNKYDRSSFYTQSAEGYIDYPGYEEAVDLGWNKN

SEQ ID NO: 369 - DNA, 1200 bp, synthetic construct
  misc_feature 1..1200: note = Variant of ERED chimera of Old Yellow Enzyme
  source 1..1200: mol_type = other DNA
atgtctttcgttaaggactttaagccgcaagcactgcgcgacaccaacctgttcgaacctattaaaattgggaacacacagctggctcatcgcgttgtaatgcctccgctgacccgcatgcgcgctacccatccgggccatattccgaacaaggagtgggctgcggtttactacggccagcgtgcacagcgtccggggacaatgattatcacggaggcgacgttcatcagcccgcaggcaggtgggtacgataacaagcctggtatttggtcagacgaacagattgccgaatggaagaaaatcttcctggctattcatgactgtcagtcatttgcgtgggtgcaactgcaggtcctgggctgggccgcctttccggataccctggcgcgtgatgggttacgttacgattctgcctccgataatgtgtatatgaatgcggaactggaggaaaaagcgaaaaaagctaacaatccgcaacatagcattactaaagacgaaattaaacaatatgtcaaagaatatgttcaggcagctaagaactcgatcgctgcgggtgcggacggcgtggaaattcactcagccaacggttatctgttaaatcagttcctggatccgcacagcaacaaccgcaccgatgagtatgggggctcaattgaaaatcgtgcacgttttactctggaagtcgttgacgcggtggttgatgccatcggcccagaaaaagtgggtttacgtctgagtccgtacggcacgttcaactctatgtcgggcggcaaagaaacggtgattgttgctcagtatgcctatgtcctgggtgagctggagcgtcgcgccaaggcggggaaacgcctggcgtttgttcatttagtcgaaccacgcgtgacagacccttggctggttgagggggagggcgaatactcagagggcactaacgattttgcttattccatttggaaaggtccgattatccgtgccggcaactatgcactacatcctgaagtagtgcgcgaacaagttaaggaccctcgcaccctgatcggctacggccgcttctttatttcaaatccagacctggtttaccgcttagaagaaggtctgccactgaacaagtatgaccgttctagtttctacacccaaagcgcggagggttacatcgactacccaacctacgaagaagccgctgatctgggctggaacaaaaac

SEQ ID NO: 370 - protein, 400 aa, synthetic construct
  REGION 1..400: note = Variant of ERED chimera of Old Yellow Enzyme
MSFVKDFKPQALRDTNLFEPIKIGNTQLAHRVVMPPLTRMRATHPGHIPNKEWAAVYYGQRAQRPGTMIITEATFISPQAGGYDNKPGIWSDEQIAEWKKIFLAIHDCQSFAWVQLQVLGWAAFPDTLARDGLRYDSASDNVYMNAELEEKAKKANNPQHSITKDEIKQYVKEYVQAAKNSIAAGADGVEIHSANGYLLNQFLDPHSNNRTDEYGGSIENRARFTLEVVDAVVDAIGPEKVGLRLSPYGTFNSMSGGKETVIVAQYAYVLGELERRAKAGKRLAFVHLVEPRVTDPWLVEGEGEYSEGTNDFAYSIWKGPIIRAGNYALHPEVVREQVKDPRTLIGYGRFFISNPDLVYRLEEGLPLNKYDRSSFYTQSAEGYIDYPTYEEAADLGWNKN

SEQ ID NO: 371 - DNA, 1200 bp, synthetic construct
  misc_feature 1..1200: note = Variant of ERED chimera of Old Yellow Enzyme
  source 1..1200: mol_type = other DNA
atgtctttcgttaaggactttaagccgcaagcactgcgcgacaccaacctgttcgaacctattaaaattgggaacacacagctggctcatcgcgttgtaatgcctccgctgacccgcatgcgcgctacccatccgggccatattccgaacaaggagtgggctgcggtttactacggccagcgtgcacagcgtccggggacaatgattatcacggaggcgacgttcatcagcccgcaggcaggtgggtacgataacaagcctggtatttggtcagacgaacagattgccgaatggaagaaaatcttcctggctattcatgactgtcagtcatttgcgtgggtgcaactgcaggtcctgggctgggccgcctttccggataccctggcgcgtgatgggttacgttacgattctgcctccgataatgtgtatatgaatgcggaactggaggaaaaagcgaaaaaagctaacaatccgcaacatagcattactaaagacgaaattaaacaatatgtcaaagaatatgttcaggcagctaagaactcgatcgctgcgggtgcggacggcgtggaaattcactcagccaacggttatctgttaaatcagttcctggatccgcacagcaacaaccgcaccgatgagtatgggggctcaattgaaaatcgtgcacgttttactctggaagtcgttgacgcggtggttgatgccatcggcccagaaaaagtgggtttacgtctgagtccgtacggcacgttcaactctatgtcgggcggcaaagaaacggtgattgttgctcagtatgcctatgtcctgggtgagctggagcgtcgcgccaaggcggggaaacgcctggcgtttgttcatttagtcgaaccacgcgtgacagacccttggctggttgagggggagggcgaatactcagagggcactaacgattttgcttattccatttggaaaggtccgattatccgtgccggcaactatgcactacatcctgaagtagtgcgcgaacaagttaaggaccctcgcaccctgatcggctacggccgcttctttatttcaaatccagacctggtttaccgcttagaagaaggtctgccactgaacaagtatgaccgttctagtttctacacccaaagcgcggagggttacatcgactacccaacctacgaagaagccgtagatctgggcgctaacaaaaac

SEQ ID NO: 372 - protein, 400 aa, synthetic construct
  REGION 1..400: note = Variant of ERED chimera of Old Yellow Enzyme
MSFVKDFKPQALRDTNLFEPIKIGNTQLAHRVVMPPLTRMRATHPGHIPNKEWAAVYYGQRAQRPGTMIITEATFISPQAGGYDNKPGIWSDEQIAEWKKIFLAIHDCQSFAWVQLQVLGWAAFPDTLARDGLRYDSASDNVYMNAELEEKAKKANNPQHSITKDEIKQYVKEYVQAAKNSIAAGADGVEIHSANGYLLNQFLDPHSNNRTDEYGGSIENRARFTLEVVDAVVDAIGPEKVGLRLSPYGTFNSMSGGKETVIVAQYAYVLGELERRAKAGKRLAFVHLVEPRVTDPWLVEGEGEYSEGTNDFAYSIWKGPIIRAGNYALHPEVVREQVKDPRTLIGYGRFFISNPDLVYRLEEGLPLNKYDRSSFYTQSAEGYIDYPTYEEAVDLGANKN

SEQ ID NO: 373 - DNA, 1200 bp, synthetic construct
  misc_feature 1..1200: note = Variant of ERED chimera of Old Yellow Enzyme
  source 1..1200: mol_type = other DNA
atgtctttcgttaaggactttaagccgcaagcactgcgcgacaccaacctgttcgaacctattaaaattgggaacacacagctggctcatcgcgttgtaatgcctccgctgacccgcatgcgcgctacccatccgggccatattccgaacaaggagtgggctgcggtttactacggccagcgtgcacagcgtccggggacaatgattatcacggaggcgacgttcatcagcccgcaggcaggtgggtacgataacaagcctggtatttggtcagacgaacagattgccgaatggaagaaaatcttcctggctattcatgactcgcagtcatttgcgtgggtgcaactgcaggtcctgggctgggccgcctttccggataccctggcgcgtgatgggttacgttacgattctgcctccgataatgtgtatatgaatgcggaactggaggaaaaagcgaaaaaagctaacaatccgcaacatagcattactaaagacgaaattaaacaatatgtcaaagaatatgttcaggcagctaagaactcgatcgctgcgggtgcggacggcgtggaaattcactcagccaacggttatctgttaaatcagttcctggatccgcacagcaacaaccgcaccgatgagtatgggggctcaattgaaaatcgtgcacgttttactctggaagtcgttgacgcggtggttgatgccatcggcccagaaaaagtgggtttacgtctgagtccgtacggcacgttcaactctatgtcgggcggcaaagaaacggtgattgttgctcagtatgcctatgtcctgggtgagctggagcgtcgcgccaaggcggggaaacgcctggcgtttgttcatttagtcgaaccacgcgtgacagacccttggctggttgagggggagggcgaatactcagagggcactaacgattttgcttattccatttggaaaggtccgattatccgtgccggcaactatgcactacatcctgaagtagtgcgcgaacaagttaaggaccctcgcaccctgatcggctacggccgcttctttatttcaaatccagacctggtttaccgcttagaagaaggtctgccactgaacaagtatgaccgttctagtttctacacccaaagcgcggagggttacatcgactacccaacctacgaagaagccgtagatctgggctggaacaaaaac

SEQ ID NO: 374 - protein, 400 aa, synthetic construct
  REGION 1..400: note = Variant of ERED chimera of Old Yellow Enzyme
MSFVKDFKPQALRDTNLFEPIKIGNTQLAHRVVMPPLTRMRATHPGHIPNKEWAAVYYGQRAQRPGTMIITEATFISPQAGGYDNKPGIWSDEQIAEWKKIFLAIHDSQSFAWVQLQVLGWAAFPDTLARDGLRYDSASDNVYMNAELEEKAKKANNPQHSITKDEIKQYVKEYVQAAKNSIAAGADGVEIHSANGYLLNQFLDPHSNNRTDEYGGSIENRARFTLEVVDAVVDAIGPEKVGLRLSPYGTFNSMSGGKETVIVAQYAYVLGELERRAKAGKRLAFVHLVEPRVTDPWLVEGEGEYSEGTNDFAYSIWKGPIIRAGNYALHPEVVREQVKDPRTLIGYGRFFISNPDLVYRLEEGLPLNKYDRSSFYTQSAEGYIDYPTYEEAVDLGWNKN

SEQ ID NO: 375 - DNA, 1200 bp, synthetic construct
  misc_feature 1..1200: note = Variant of ERED chimera of Old Yellow Enzyme
  source 1..1200: mol_type = other DNA
atgtctttcgttaaggactttaagccgcaagtgctgcgcgacaccaacctgttcgaacctattaaaattgggaacacacagctggctcatcgcgttgtaatgcctccgctgacccgcatgcgcgctacccatccgggccatattccgaacaaggagtgggctgcggtttactacggccagcgtgcacagcgtccggggacaatgattatcacggaggcgacgttcatcagcccgcaggcaggtgggtacgataacaagcctggtatttggtcagacgaacagattgccgaatggaagaaaatcttcctggctattcatgactgtcagtcatttgcgtgggtgcaactgcaggtcctgggctgggccgcctttccggataccctggcgcgtgatgggttacgttacgattctgcctccgataatgtgtatatgaatgcggaactggaggaaaaagcgaaaaaagctaacaatccgcaacatagcattactaaagacgaaattaaacaatatgtcaaagaatatgttcaggcagctaagaactcgatcgctgcgggtgcggacggcgtggaaattcactcagccaacggttatctgttaaatcagttcctggatccgcacagcaacaaccgcaccgatgagtatgggggctcaattgaaaatcgtgcacgttttactctggaagtcgttgacgcggtggttgatgccatcggcccagaaaaagtgggtttacgtctgagtccgtacggcacgttcaactctatgtcgggcggcaaagaaacggtgattgttgctcagtatgcctatgtcctgggtgagctggagcgtcgcgccaaggcggggaaacgcctggcgtttgttcatttagtcgaaccacgcgtgacagacccttggctggttgagggggagggcgaatactcagagggcactaacgattttgcttattccatttggaaaggtccgattatccgtgccggcaactatgcactacatcctgaagtagtgcgcgaacaagttaaggaccctcgcaccctgatcggctacggccgcttctttatttcaaatccagacctggtttaccgcttagaagaaggtctgccactgaacaagtatgaccgttctagtttctacacccaaagcgcggagggttacatcgactacccaacctacgaagaagccgtagatctgggctggaacaaaaac

SEQ ID NO: 376 - protein, 400 aa, synthetic construct
  REGION 1..400: note = Variant of ERED chimera of Old Yellow Enzyme
MSFVKDFKPQVLRDTNLFEPIKIGNTQLAHRVVMPPLTRMRATHPGHIPNKEWAAVYYGQRAQRPGTMIITEATFISPQAGGYDNKPGIWSDEQIAEWKKIFLAIHDCQSFAWVQLQVLGWAAFPDTLARDGLRYDSASDNVYMNAELEEKAKKANNPQHSITKDEIKQYVKEYVQAAKNSIAAGADGVEIHSANGYLLNQFLDPHSNNRTDEYGGSIENRARFTLEVVDAVVDAIGPEKVGLRLSPYGTFNSMSGGKETVIVAQYAYVLGELERRAKAGKRLAFVHLVEPRVTDPWLVEGEGEYSEGTNDFAYSIWKGPIIRAGNYALHPEVVREQVKDPRTLIGYGRFFISNPDLVYRLEEGLPLNKYDRSSFYTQSAEGYIDYPTYEEAVDLGWNKN

SEQ ID NO: 377 - DNA, 1200 bp, synthetic construct
  misc_feature 1..1200: note = Variant of ERED chimera of Old Yellow Enzyme
  source 1..1200: mol_type = other DNA
atgtctttcgttaaggactttaagccgcaagcactggtggacaccaacctgttcgaacctattaaaattgggaacacacagctggctcatcgcgttgtaatgcctccgctgacccgcatgcgcgctacccatccgggccatattccgaacaaggagtgggctgcggtttactacggccagcgtgcacagcgtccggggacaatgattatcacggaggcgacgttcatcagcccgcaggcaggtgggtacgataacaagcctggtatttggtcagacgaacagattgccgaatggaagaaaatcttcctggctattcatgactgtcagtcatttgcgtgggtgcaactgcaggtcctgggctgggccgcctttccggataccctggcgcgtgatgggttacgttacgattctgcctccgataatgtgtatatgaatgcggaactggaggaaaaagcgaaaaaagctaacaatccgcaacatagcattactaaagacgaaattaaacaatatgtcaaagaatatgttcaggcagctaagaactcgatcgctgcgggtgcggacggcgtggaaattcactcagccaacggttatctgttaaatcagttcctggatccgcacagcaacaaccgcaccgatgagtatgggggctcaattgaaaatcgtgcacgttttactctggaagtcgttgacgcggtggttgatgccatcggcccagaaaaagtgggtttacgtctgagtccgtacggcacgttcaactctatgtcgggcggcaaagaaacggtgattgttgctcagtatgcctatgtcctgggtgagctggagcgtcgcgccaaggcggggaaacgcctggcgtttgttcatttagtcgaaccacgcgtgacagacccttggctggttgagggggagggcgaatactcagagggcactaacgattttgcttattccatttggaaaggtccgattatccgtgccggcaactatgcactacatcctgaagtagtgcgcgaacaagttaaggaccctcgcaccctgatcggctacggccgcttctttatttcaaatccagacctggtttaccgcttagaagaaggtctgccactgaacaagtatgaccgttctagtttctacacccaaagcgcggagggttacatcgactacccaacctacgaagaagccgtagatctgggctggaacaaaaac

SEQ ID NO: 378 - protein, 400 aa, synthetic construct
  REGION 1..400: note = Variant of ERED chimera of Old Yellow Enzyme
MSFVKDFKPQALVDTNLFEPIKIGNTQLAHRVVMPPLTRMRATHPGHIPNKEWAAVYYGQRAQRPGTMIITEATFISPQAGGYDNKPGIWSDEQIAEWKKIFLAIHDCQSFAWVQLQVLGWAAFPDTLARDGLRYDSASDNVYMNAELEEKAKKANNPQHSITKDEIKQYVKEYVQAAKNSIAAGADGVEIHSANGYLLNQFLDPHSNNRTDEYGGSIENRARFTLEVVDAVVDAIGPEKVGLRLSPYGTFNSMSGGKETVIVAQYAYVLGELERRAKAGKRLAFVHLVEPRVTDPWLVEGEGEYSEGTNDFAYSIWKGPIIRAGNYALHPEVVREQVKDPRTLIGYGRFFISNPDLVYRLEEGLPLNKYDRSSFYTQSAEGYIDYPTYEEAVDLGWNKN

SEQ ID NO: 379 - DNA, 1200 bp, synthetic construct
  misc_feature 1..1200: note = Variant of ERED chimera of Old Yellow Enzyme
  source 1..1200: mol_type = other DNA
atgtctttcgttaaggactttaagccgcaagcactgcgcgacaccaacctgttcgaacctattaaaattgggaacacacagctggctcatcgcgttgtaatgcctccgctgacccgcatgcgcgctacccatccgggccatattccgaacaaggagtgggctgcggtttactacggccagcgtgcacagcgtccggggacaatgattatcacggaggcgacgttcatcagcccgcaggcaggtgggtacgataacaagcctggtatttggtcagacgaacagattgccgaatggaagaaaatcttcctggctattcatgactgtcagtcatttgcgtgggtgcaactgcaggtcctgggctgggccgcctttccggataccctggcgcgtgatgggttacgttacgattctgcctccgataatgtgtatatgaatgcggaactggaggaaaaagcgaaaaaagctaacaatccgcaacatagcattactaaagacgaaattaaacaatatgtcaaagaatatgttcaggcagctaagaactcgatcgctgcgggtgcggacggcgtggaaattcactcagccaacggttatctgttaaatcagttcctggatccgcacagcaacaaccgcaccgatgagtatgggggctcaattgaaaatcgtgcacgttttactctggaagtcgttgacgcggtggttgatgggatcggcccagaaaaagtgggtttacgtctgagtccgtacggcacgttcaactctatgtcgggcggcaaagaaacggtgattgttgctcagtatgcctatgtcctgggtgagctggagcgtcgcgccaaggcggggaaacgcctggcgtttgttcatttagtcgaaccacgcgtgacagacccttggctggttgagggggagggcgaatactcagagggcactaacgattttgcttattccatttggaaaggtccgattatccgtgccggcaactatgcactacatcctgaagtagtgcgcgaacaagttaaggaccctcgcaccctgatcggctacggccgcttctttatttcaaatccagacctggtttaccgcttagaagaaggtctgccactgaacaagtatgaccgttctagtttctacacccaaagcgcggagggttacatcgactacccaacctacgaagaagccgtagatctgggctggaacaaaaac

SEQ ID NO: 380 - protein, 400 aa, synthetic construct
  REGION 1..400: note = Variant of ERED chimera of Old Yellow Enzyme
MSFVKDFKPQALRDTNLFEPIKIGNTQLAHRVVMPPLTRMRATHPGHIPNKEWAAVYYGQRAQRPGTMIITEATFISPQAGGYDNKPGIWSDEQIAEWKKIFLAIHDCQSFAWVQLQVLGWAAFPDTLARDGLRYDSASDNVYMNAELEEKAKKANNPQHSITKDEIKQYVKEYVQAAKNSIAAGADGVEIHSANGYLLNQFLDPHSNNRTDEYGGSIENRARFTLEVVDAVVDGIGPEKVGLRLSPYGTFNSMSGGKETVIVAQYAYVLGELERRAKAGKRLAFVHLVEPRVTDPWLVEGEGEYSEGTNDFAYSIWKGPIIRAGNYALHPEVVREQVKDPRTLIGYGRFFISNPDLVYRLEEGLPLNKYDRSSFYTQSAEGYIDYPTYEEAVDLGWNKN

SEQ ID NO: 381 - DNA, 1200 bp, synthetic construct
  misc_feature 1..1200: note = Variant of ERED chimera of Old Yellow Enzyme
  source 1..1200: mol_type = other DNA
atgtctttcgttaaggactttaagccgcaagcactgcgcgacaccaacctgttcgaacctattaaaattgggaacacacagctggctcatcgcgttgtaatgcctccgctgacccgcatgcgcgctacccatccgggccatattccgaacaaggagtgggctgcggtttactacggccagcgtgcacagcgtccggggacaatgattatcacggaggcgacgttcatcagcccgcaggcaggtgggtacgataacaagcctggtatttggtcagacgaacagattgccgaatggaagaaaatcttcctggctattcatgactgtcagtcatttgcgtgggtgcaactgcaggtcctgggctgggccgcctttccggataccctggcgcgtgatgggttacgttacgattctgcctccgataatgtgtatatgaatgcggaactggaggaaaaagcgaaaaaagctaacaatccgcaacatagcattactaaagacgaaattaaacaatatgtcaaagaatatgttcaggcagctaagaactcgatcgctgcgggtgcggacggcgtggaaattcactcagccaacggttatctgttaaatcagttcctggatccgcacagcaacaaccgcaccgatgagtatgggggctcaattgaaaatcgtgcacgttttactctggaagtcgttgacgcggtggttgatgccatcggcccagaaaaagtgggtttacgtctgagtccgtacggcacgttcaactctatgtcgggcggcaaagaaacggtgattgttgctcagtatgcctatgtcctgggtgagctggagcgtcgcgccaaggcggggaaacgcctggcgtttgttcatttagtcgaaccacgcgtgacagacccttggctggttgagggggagggcgaatactcagagggcactaacgattttgcttattccatttggaaaggtccgattatccgtgccggcaactatgcactacatcctgaagtagtgcgcgaacaagttaaggaccctcgcaccctgatcggctacggccgcttctttatttcaaatccagacctggtttaccgcttagaagaaggtctgccactgaacaagtatgaccgttctagtttctacacccaaagcgcggagggttacatcgactacccaacctacgaagaaggtgtagatctgggctggaacaaaaac

SEQ ID NO: 382 - protein, 400 aa, synthetic construct
  REGION 1..400: note = Variant of ERED chimera of Old Yellow Enzyme
MSFVKDFKPQALRDTNLFEPIKIGNTQLAHRVVMPPLTRMRATHPGHIPNKEWAAVYYGQRAQRPGTMIITEATFISPQAGGYDNKPGIWSDEQIAEWKKIFLAIHDCQSFAWVQLQVLGWAAFPDTLARDGLRYDSASDNVYMNAELEEKAKKANNPQHSITKDEIKQYVKEYVQAAKNSIAAGADGVEIHSANGYLLNQFLDPHSNNRTDEYGGSIENRARFTLEVVDAVVDAIGPEKVGLRLSPYGTFNSMSGGKETVIVAQYAYVLGELERRAKAGKRLAFVHLVEPRVTDPWLVEGEGEYSEGTNDFAYSIWKGPIIRAGNYALHPEVVREQVKDPRTLIGYGRFFISNPDLVYRLEEGLPLNKYDRSSFYTQSAEGYIDYPTYEEGVDLGWNKN

SEQ ID NO: 383 - DNA, 1200 bp, synthetic construct
  misc_feature 1..1200: note = Variant of ERED chimera of Old Yellow Enzyme
  source 1..1200: mol_type = other DNA
atgtctttcgttaaggactttaagccgcaagcactgcgcgacaccaacctgttcgaacctattaaaattgggaacacacagctggctcatcgcgttgtaatgcctccgctgacccgcatgcgcgctacccatccgggccatattccgaacaaggagtgggctgcggtttactacggccagcgtgcacaggtgccggggacaatgattatcacggaggcgacgttcatcagcccgcaggcaggtgggtacgataacaagcctggtatttggtcagacgaacagattgccgaatggaagaaaatcttcctggctattcatgactgtcagtcatttgcgtgggtgcaactgcaggtcctgggctgggccgcctttccggataccctggcgcgtgatgggttacgttacgattctgcctccgataatgtgtatatgaatgcggaactggaggaaaaagcgaaaaaagctaacaatccgcaacatagcattactaaagacgaaattaaacaatatgtcaaagaatatgttcaggcagctaagaactcgatcgctgcgggtgcggacggcgtggaaattcactcagccaacggttatctgttaaatcagttcctggatccgcacagcaacaaccgcaccgatgagtatgggggctcaattgaaaatcgtgcacgttttactctggaagtcgttgacgcggtggttgatgccatcggcccagaaaaagtgggtttacgtctgagtccgtacggcacgttcaactctatgtcgggcggcaaagaaacggtgattgttgctcagtatgcctatgtcctgggtgagctggagcgtcgcgccaaggcggggaaacgcctggcgtttgttcatttagtcgaaccacgcgtgacagacccttggctggttgagggggagggcgaatactcagagggcactaacgattttgcttattccatttggaaaggtccgattatccgtgccggcaactatgcactacatcctgaagtagtgcgcgaacaagttaaggaccctcgcaccctgatcggctacggccgcttctttatttcaaatccagacctggtttaccgcttagaagaaggtctgccactgaacaagtatgaccgttctagtttctacacccaaagcgcggagggttacatcgactacccaacctacgaagaagccgtagatctgggctggaacaaaaac

SEQ ID NO: 384 - protein, 400 aa, synthetic construct
  REGION 1..400: note = Variant of ERED chimera of Old Yellow Enzyme
MSFVKDFKPQALRDTNLFEPIKIGNTQLAHRVVMPPLTRMRATHPGHIPNKEWAAVYYGQRAQVPGTMIITEATFISPQAGGYDNKPGIWSDEQIAEWKKIFLAIHDCQSFAWVQLQVLGWAAFPDTLARDGLRYDSASDNVYMNAELEEKAKKANNPQHSITKDEIKQYVKEYVQAAKNSIAAGADGVEIHSANGYLLNQFLDPHSNNRTDEYGGSIENRARFTLEVVDAVVDAIGPEKVGLRLSPYGTFNSMSGGKETVIVAQYAYVLGELERRAKAGKRLAFVHLVEPRVTDPWLVEGEGEYSEGTNDFAYSIWKGPIIRAGNYALHPEVVREQVKDPRTLIGYGRFFISNPDLVYRLEEGLPLNKYDRSSFYTQSAEGYIDYPTYEEAVDLGWNKN

SEQ ID NO: 385 - DNA, 1200 bp, synthetic construct
  misc_feature 1..1200: note = Variant of ERED chimera of Old Yellow Enzyme
  source 1..1200: mol_type = other DNA
atgtctttcgttaaggactttaagccgcaagcactgcgcgacaccaacctgttcgaagagattaaaattgggaacacacagctggctcatcgcgttgtaatgcctccgctgacccgcatgcgcgctacccatccgggccatattccgaacaaggagtgggctgcggtttactacggccagcgtgcacagcgtccggggacaatgattatcacggaggcgacgttcatcagcccgcaggcaggtgggtacgataacaagcctggtatttggtcagacgaacagattgccgaatggaagaaaatcttcctggctattcatgactgtcagtcatttgcgtgggtgcaactgcaggtcctgggctgggccgcctttccggataccctggcgcgtgatgggttacgttacgattctgcctccgataatgtgtatatgaatgcggaactggaggaaaaagcgaaaaaagctaacaatccgcaacatagcattactaaagacgaaattaaacaatatgtcaaagaatatgttcaggcagctaagaactcgatcgctgcgggtgcggacggcgtggaaattcactcagccaacggttatctgttaaatcagttcctggatccgcacagcaacaaccgcaccgatgagtatgggggctcaattgaaaatcgtgcacgttttactctggaagtcgttgacgcggtggttgatgccatcggcccagaaaaagtgggtttacgtctgagtccgtacggcacgttcaactctatgtcgggcggcaaagaaacggtgattgttgctcagtatgcctatgtcctgggtgagctggagcgtcgcgccaaggcggggaaacgcctggcgtttgttcatttagtcgaaccacgcgtgacagacccttggctggttgagggggagggcgaatactcagagggcactaacgattttgcttattccatttggaaaggtccgattatccgtgccggcaactatgcactacatcctgaagtagtgcgcgaacaagttaaggaccctcgcaccctgatcggctacggccgcttctttatttcaaatccagacctggtttaccgcttagaagaaggtctgccactgaacaagtatgaccgttctagtttctacacccaaagcgcggagggttacatcgactacccaacctacgaagaagccgtagatctgggctggaacaaaaac

SEQ ID NO: 386 - protein, 400 aa, synthetic construct
  REGION 1..400: note = Variant of ERED chimera of Old Yellow Enzyme
MSFVKDFKPQALRDTNLFEEIKIGNTQLAHRVVMPPLTRMRATHPGHIPNKEWAAVYYGQRAQRPGTMIITEATFISPQAGGYDNKPGIWSDEQIAEWKKIFLAIHDCQSFAWVQLQVLGWAAFPDTLARDGLRYDSASDNVYMNAELEEKAKKANNPQHSITKDEIKQYVKEYVQAAKNSIAAGADGVEIHSANGYLLNQFLDPHSNNRTDEYGGSIENRARFTLEVVDAVVDAIGPEKVGLRLSPYGTFNSMSGGKETVIVAQYAYVLGELERRAKAGKRLAFVHLVEPRVTDPWLVEGEGEYSEGTNDFAYSIWKGPIIRAGNYALHPEVVREQVKDPRTLIGYGRFFISNPDLVYRLEEGLPLNKYDRSSFYTQSAEGYIDYPTYEEAVDLGWNKN

SEQ ID NO: 387 - DNA, 1200 bp, synthetic construct
  misc_feature 1..1200: note = Variant of ERED chimera of Old Yellow Enzyme
  source 1..1200: mol_type = other DNA
atgtctttcgttaaggactttaagccgcaagcactgcgcgacaccaacctgttcgaacctattaaaattgggaacacacagctggctcatcgcgttgtaatgcctccgctgacccgcatgcgcgctacccatccgggccatattccgaacaaggagtgggctgcggtttactacggccagcgtgcacagaatccggggacaatgattatcacggaggcgacgttcatcagcccgcaggcaggtgggtacgataacaagcctggtatttggtcagacgaacagattgccgaatggaagaaaatcttcctggctattcatgactgtcagtcatttgcgtgggtgcaactgcaggtcctgggctgggccgcctttccggataccctggcgcgtgatgggttacgttacgattctgcctccgataatgtgtatatgaatgcggaactggaggaaaaagcgaaaaaagctaacaatccgcaacatagcattactaaagacgaaattaaacaatatgtcaaagaatatgttcaggcagctaagaactcgatcgctgcgggtgcggacggcgtggaaattcactcagccaacggttatctgttaaatcagttcctggatccgcacagcaacaaccgcaccgatgagtatgggggctcaattgaaaatcgtgcacgttttactctggaagtcgttgacgcggtggttgatgccatcggcccagaaaaagtgggtttacgtctgagtccgtacggcacgttcaactctatgtcgggcggcaaagaaacggtgattgttgctcagtatgcctatgtcctgggtgagctggagcgtcgcgccaaggcggggaaacgcctggcgtttgttcatttagtcgaaccacgcgtgacagacccttggctggttgagggggagggcgaatactcagagggcactaacgattttgcttattccatttggaaaggtccgattatccgtgccggcaactatgcactacatcctgaagtagtgcgcgaacaagttaaggaccctcgcaccctgatcggctacggccgcttctttatttcaaatccagacctggtttaccgcttagaagaaggtctgccactgaacaagtatgaccgttctagtttctacacccaaagcgcggagggttacatcgactacccaacctacgaagaagccgtagatctgggctggaacaaaaac

SEQ ID NO: 388 - protein, 400 aa, synthetic construct
  REGION 1..400: note = Variant of ERED chimera of Old Yellow Enzyme
MSFVKDFKPQALRDTNLFEPIKIGNTQLAHRVVMPPLTRMRATHPGHIPNKEWAAVYYGQRAQNPGTMIITEATFISPQAGGYDNKPGIWSDEQIAEWKKIFLAIHDCQSFAWVQLQVLGWAAFPDTLARDGLRYDSASDNVYMNAELEEKAKKANNPQHSITKDEIKQYVKEYVQAAKNSIAAGADGVEIHSANGYLLNQFLDPHSNNRTDEYGGSIENRARFTLEVVDAVVDAIGPEKVGLRLSPYGTFNSMSGGKETVIVAQYAYVLGELERRAKAGKRLAFVHLVEPRVTDPWLVEGEGEYSEGTNDFAYSIWKGPIIRAGNYALHPEVVREQVKDPRTLIGYGRFFISNPDLVYRLEEGLPLNKYDRSSFYTQSAEGYIDYPTYEEAVDLGWNKN

SEQ ID NO: 389 - DNA, 1200 bp, synthetic construct
  misc_feature 1..1200: note = Variant of ERED chimera of Old Yellow Enzyme
  source 1..1200: mol_type = other DNA
atgtctttcgttaaggactttaagccgcaagcactgcgcgacaccaacctgttcgaacctattaaaattgggaacacacagctggctcatcgcgttgtaatgcctccgctgacccgcatgcgcgctacccatccgggccatattccgaacaaggagtgggctgcggtttactacggccagcgtgcacagcgtccggggacaatgattatcacggaggcgacgttcatcagcccgcaggcaggtgggtacgataacaagcctggtatttggtcagacgaacagattgccgaatggaagaaaatcttcctggctattcatgactgtcagtcatttgcgtgggtgcaactgcaggtcctgggctgggccgcctttccggataccctggcgcgtgatgggttacgttacgattctgcctccgataatgtgtatatgaatgcggaactggaggaaaaagcgaaaaaagctaacaatccgcaacatagcattactaaagacgaaattaaacaatatgtcaaagaatatgttcaggcagctaagaactcgatcgctgcgggtgcggacggcgtggaaattcactcagccaacggttatctgttaaatcagttcctggatccgcacagcaacaaccgcaccgatgagtatgggggctcaattgaaaatcgtgcacgttttactctggaagtcgttgacgcggtggttgatgccatcggcccagaaaaagtgggtttacgtctgagtccgtacggcacgttcaactctatgtcgggcggcaaagaaacggtgattgttgctcagtatgcctatgtcctgggtgagctggagcgtcgcgccaaggcggggaaacgcctggcgtttgttcatttagtcgaaccacgcgtgacagacccttggctggttgagggggagggcgaatactcagagggcactaacgattttgcttattccatttggaaaggtccgattatccgtgccggcaactatgcactacatcctgaagtagtgcgcgaacaagttaaggaccctcgcaccctgatcggctacggccgcttctttatttcaaatccagacctggtttaccgcttagaagaaggtctgccactgaacaagtatgaccgttctagtttctacacccaaagcgcggagggttacatcgactacccaacctacgaagaagccgtagatctgggctttaacaaaaac

SEQ ID NO: 390 - protein, 400 aa, synthetic construct
  REGION 1..400: note = Variant of ERED chimera of Old Yellow Enzyme
MSFVKDFKPQALRDTNLFEPIKIGNTQLAHRVVMPPLTRMRATHPGHIPNKEWAAVYYGQRAQRPGTMIITEATFISPQAGGYDNKPGIWSDEQIAEWKKIFLAIHDCQSFAWVQLQVLGWAAFPDTLARDGLRYDSASDNVYMNAELEEKAKKANNPQHSITKDEIKQYVKEYVQAAKNSIAAGADGVEIHSANGYLLNQFLDPHSNNRTDEYGGSIENRARFTLEVVDAVVDAIGPEKVGLRLSPYGTFNSMSGGKETVIVAQYAYVLGELERRAKAGKRLAFVHLVEPRVTDPWLVEGEGEYSEGTNDFAYSIWKGPIIRAGNYALHPEVVREQVKDPRTLIGYGRFFISNPDLVYRLEEGLPLNKYDRSSFYTQSAEGYIDYPTYEEAVDLGFNKN

SEQ ID NO: 391 - DNA, 1200 bp, synthetic construct
  misc_feature 1..1200: note = Variant of ERED chimera of Old Yellow Enzyme
  source 1..1200: mol_type = other DNA
atgtctttcgttaaggactttaagccgcaagcactgcgcgacaccaacctgttcgaacctattaaaattgggaacacacagctggctcatcgcgttgtaatgcctccgctgacccgcatgcgcgctacccatccgggccatattccgaacaaggagtgggctgcggtttactacggccagcgtgcacagcgtccggggacaatgattatcacggaggcgacgttcatcagcccgcaggcaggtgggtacgataacaagcctggtatttggtcagacgaacagattgccgaatggaagaaaatcttcctggctattcatgactgtcagtcatttgcgtgggtgcaactgcaggtcctgggctgggccgcctttccggataccctggcgcgtgatgggttacgttacgattctgcctccgataatgtgtatatgaatgcggaactggaggaaaaagcgaaaaaagctaacaatccgcaacatagcattactaaagacgaaattaaacaatatgtcaaagaatataggcaggcagctaagaactcgatcgctgcgggtgcggacggcgtggaaattcactcagccaacggttatctgttaaatcagttcctggatccgcacagcaacaaccgcaccgatgagtatgggggctcaattgaaaatcgtgcacgttttactctggaagtcgttgacgcggtggttgatgccatcggcccagaaaaagtgggtttacgtctgagtccgtacggcacgttcaactctatgtcgggcggcaaagaaacggtgattgttgctcagtatgcctatgtcctgggtgagctggagcgtcgcgccaaggcggggaaacgcctggcgtttgttcatttagtcgaaccacgcgtgacagacccttggctggttgagggggagggcgaatactcagagggcactaacgattttgcttattccatttggaaaggtccgattatccgtgccggcaactatgcactacatcctgaagtagtgcgcgaacaagttaaggaccctcgcaccctgatcggctacggccgcttctttatttcaaatccagacctggtttaccgcttagaagaaggtctgccactgaacaagtatgaccgttctagtttctacacccaaagcgcggagggttacatcgactacccaacctacgaagaagccgtagatctgggctggaacaaaaac

SEQ ID NO: 392 - protein, 400 aa, synthetic construct
  REGION 1..400: note = Variant of ERED chimera of Old Yellow Enzyme
MSFVKDFKPQALRDTNLFEPIKIGNTQLAHRVVMPPLTRMRATHPGHIPNKEWAAVYYGQRAQRPGTMIITEATFISPQAGGYDNKPGIWSDEQIAEWKKIFLAIHDCQSFAWVQLQVLGWAAFPDTLARDGLRYDSASDNVYMNAELEEKAKKANNPQHSITKDEIKQYVKEYRQAAKNSIAAGADGVEIHSANGYLLNQFLDPHSNNRTDEYGGSIENRARFTLEVVDAVVDAIGPEKVGLRLSPYGTFNSMSGGKETVIVAQYAYVLGELERRAKAGKRLAFVHLVEPRVTDPWLVEGEGEYSEGTNDFAYSIWKGPIIRAGNYALHPEVVREQVKDPRTLIGYGRFFISNPDLVYRLEEGLPLNKYDRSSFYTQSAEGYIDYPTYEEAVDLGWNKN

SEQ ID NO: 393 - DNA, 1200 bp, synthetic construct
  misc_feature 1..1200: note = Variant of ERED chimera of Old Yellow Enzyme
  source 1..1200: mol_type = other DNA
atgtctttcgttaaggactttaagccgcaagcactgcgcgacaccaacctgttcgaacctattaaaattgggaacacacagctggctcatcgcgttgtaatgcctccgctgacccgcatgcgcgctacccatccgggccatattccgaacaaggagtgggctgcggtttactacggccagcgtgcacagcgtccggggacaatgattatcacggaggcgacgttcatcagcccgcaggcaggtgggtacgataacaagcctggtatttggtcagacgaacagattgccgaatggaagaaaatcttcctggctattcatgactgtcagtcatttgcgtgggtgcaactgcaggtcctgggctgggccgcctttccggataccctggcgcgtgatgggttacgttacgattctgcctccgataatgtgtatatgaatgcggaactggaggaaaaagcgaaaaaagctaacaatccgcaacatagcattactaaagacgaaattaaacaatatgtcaaagaatatgttcaggcagctaagaactcgatcgctgcgggtgcggacggcgtggaaattcactcagccaacggttatctgttaaatcagttcctggatccgcacagcaacaaccgcaccgatgagtatgggggctcaattgaaaatcgtgcacgttttactctggaagtcgttgacgcggtggttgatgccatcggcccagaaaaagtgggtttacgtctgagtccgtacggcacgttcaactctatgtcgggcggcaaagaaacggtgattgttgctcagtatgcctatgtcctgggtgagctggagcgtcgcgccaaggcggggaaacgcctggcgtttgttcatttagtcgaaccacgcgtgacagacccttggctggttgagggggagggcgaatactcagagggcactaacgattttgcttattccatttggaaaggtcggattatccgtgccggcaactatgcactacatcctgaagtagtgcgcgaacaagttaaggaccctcgcaccctgatcggctacggccgcttctttatttcaaatccagacctggtttaccgcttagaagaaggtctgccactgaacaagtatgaccgttctagtttctacacccaaagcgcggagggttacatcgactacccaacctacgaagaagccgtagatctgggctggaacaaaaac

SEQ ID NO: 394 - protein, 400 aa, synthetic construct
  REGION 1..400: note = Variant of ERED chimera of Old Yellow Enzyme
MSFVKDFKPQALRDTNLFEPIKIGNTQLAHRVVMPPLTRMRATHPGHIPNKEWAAVYYGQRAQRPGTMIITEATFISPQAGGYDNKPGIWSDEQIAEWKKIFLAIHDCQSFAWVQLQVLGWAAFPDTLARDGLRYDSASDNVYMNAELEEKAKKANNPQHSITKDEIKQYVKEYVQAAKNSIAAGADGVEIHSANGYLLNQFLDPHSNNRTDEYGGSIENRARFTLEVVDAVVDAIGPEKVGLRLSPYGTFNSMSGGKETVIVAQYAYVLGELERRAKAGKRLAFVHLVEPRVTDPWLVEGEGEYSEGTNDFAYSIWKGRIIRAGNYALHPEVVREQVKDPRTLIGYGRFFISNPDLVYRLEEGLPLNKYDRSSFYTQSAEGYIDYPTYEEAVDLGWNKN

SEQ ID NO: 395 - DNA, 1200 bp, synthetic construct
  misc_feature 1..1200: note = Variant of ERED chimera of Old Yellow Enzyme
  source 1..1200: mol_type = other DNA
atgtctttcgttaaggactttaagccgcaagcactgcgcgacaccaacctgttcgaacctattaaaattgggaacacacagctggctcatcgcgttgtaatgcctccgctgacccgcatgcgcgctacccatccgggccatattccgaacaaggagtgggctgcggtttactacggccagcgtgcacagcgtccggggacaatgattatcacggaggcgacgttcatcagcccgcaggcaggtgggtacgataacaagcctggtatttggtcagacgaacagattgccgaatggaagaaaatcttcctggctattcatgacctgcagtcatttgcgtgggtgcaactgcaggtcctgggctgggccgcctttccggataccctggcgcgtgatgggttacgttacgattctgcctccgataatgtgtatatgaatgcggaactggaggaaaaagcgaaaaaagctaacaatccgcaacatagcattactaaagacgaaattaaacaatatgtcaaagaatatgttcaggcagctaagaactcgatcgctgcgggtgcggacggcgtggaaattcactcagccaacggttatctgttaaatcagttcctggatccgcacagcaacaaccgcaccgatgagtatgggggctcaattgaaaatcgtgcacgttttactctggaagtcgttgacgcggtggttgatgccatcggcccagaaaaagtgggtttacgtctgagtccgtacggcacgttcaactctatgtcgggcggcaaagaaacggtgattgttgctcagtatgcctatgtcctgggtgagctggagcgtcgcgccaaggcggggaaacgcctggcgtttgttcatttagtcgaaccacgcgtgacagacccttggctggttgagggggagggcgaatactcagagggcactaacgattttgcttattccatttggaaaggtccgattatccgtgccggcaactatgcactacatcctgaagtagtgcgcgaacaagttaaggaccctcgcaccctgatcggctacggccgcttctttatttcaaatccagacctggtttaccgcttagaagaaggtctgccactgaacaagtatgaccgttctagtttctacacccaaagcgcggagggttacatcgactacccaacctacgaagaagccgtagatctgggctggaacaaaaac

SEQ ID NO: 396 - protein, 400 aa, synthetic construct
  REGION 1..400: note = Variant of ERED chimera of Old Yellow Enzyme
MSFVKDFKPQALRDTNLFEPIKIGNTQLAHRVVMPPLTRMRATHPGHIPNKEWAAVYYGQRAQRPGTMIITEATFISPQAGGYDNKPGIWSDEQIAEWKKIFLAIHDLQSFAWVQLQVLGWAAFPDTLARDGLRYDSASDNVYMNAELEEKAKKANNPQHSITKDEIKQYVKEYVQAAKNSIAAGADGVEIHSANGYLLNQFLDPHSNNRTDEYGGSIENRARFTLEVVDAVVDAIGPEKVGLRLSPYGTFNSMSGGKETVIVAQYAYVLGELERRAKAGKRLAFVHLVEPRVTDPWLVEGEGEYSEGTNDFAYSIWKGPIIRAGNYALHPEVVREQVKDPRTLIGYGRFFISNPDLVYRLEEGLPLNKYDRSSFYTQSAEGYIDYPTYEEAVDLGWNKN

SEQ ID NO: 397 - DNA, 1200 bp, synthetic construct
  misc_feature 1..1200: note = Variant of ERED chimera of Old Yellow Enzyme
  source 1..1200: mol_type = other DNA
atgtctttcgttaaggactttaagccgcaagcactgcgcgacaccaacctgttcgaacctattaaaattgggaacacacagctggctcatcgcgttgtaatgcctccgctgacccgcatgcgcgctacccatccgggccatattccgaacaaggagtgggctgcggtttactacggccagcgtgcacagcgtccggggacaatgattatcacggaggcgacgttcatcagcccgcaggcaggtgggtacgataacaagcctggtatttggtcagacgaacagattgccgaatgggtgaaaatcttcctggctattcatgactgtcagtcatttgcgtgggtgcaactgcaggtcctgggctgggccgcctttccggataccctggcgcgtgatgggttacgttacgattctgcctccgataatgtgtatatgaatgcggaactggaggaaaaagcgaaaaaagctaacaatccgcaacatagcattactaaagacgaaattaaacaatatgtcaaagaatatgttcaggcagctaagaactcgatcgctgcgggtgcggacggcgtggaaattcactcagccaacggttatctgttaaatcagttcctggatccgcacagcaacaaccgcaccgatgagtatgggggctcaattgaaaatcgtgcacgttttactctggaagtcgttgacgcggtggttgatgccatcggcccagaaaaagtgggtttacgtctgagtccgtacggcacgttcaactctatgtcgggcggcaaagaaacggtgattgttgctcagtatgcctatgtcctgggtgagctggagcgtcgcgccaaggcggggaaacgcctggcgtttgttcatttagtcgaaccacgcgtgacagacccttggctggttgagggggagggcgaatactcagagggcactaacgattttgcttattccatttggaaaggtccgattatccgtgccggcaactatgcactacatcctgaagtagtgcgcgaacaagttaaggaccctcgcaccctgatcggctacggccgcttctttatttcaaatccagacctggtttaccgcttagaagaaggtctgccactgaacaagtatgaccgttctagtttctacacccaaagcgcggagggttacatcgactacccaacctacgaagaagccgtagatctgggctggaacaaaaac

SEQ ID NO: 398 - protein, 400 aa, synthetic construct
  REGION 1..400: note = Variant of ERED chimera of Old Yellow Enzyme
MSFVKDFKPQALRDTNLFEPIKIGNTQLAHRVVMPPLTRMRATHPGHIPNKEWAAVYYGQRAQRPGTMIITEATFISPQAGGYDNKPGIWSDEQIAEWVKIFLAIHDCQSFAWVQLQVLGWAAFPDTLARDGLRYDSASDNVYMNAELEEKAKKANNPQHSITKDEIKQYVKEYVQAAKNSIAAGADGVEIHSANGYLLNQFLDPHSNNRTDEYGGSIENRARFTLEVVDAVVDAIGPEKVGLRLSPYGTFNSMSGGKETVIVAQYAYVLGELERRAKAGKRLAFVHLVEPRVTDPWLVEGEGEYSEGTNDFAYSIWKGPIIRAGNYALHPEVVREQVKDPRTLIGYGRFFISNPDLVYRLEEGLPLNKYDRSSFYTQSAEGYIDYPTYEEAVDLGWNKN

SEQ ID NO: 399 - DNA, 1200 bp, synthetic construct
  misc_feature 1..1200: note = Variant of ERED chimera of Old Yellow Enzyme
  source 1..1200: mol_type = other DNA
atgtctttcgttaaggactttaagccgcaagcactgcgcgacaccaacctgttcgaacctattaaaattgggaacacacagctggtgcatcgcgttgtaatgcctccgctgacccgcatgcgcgctacccatccgggccatattccgaacaaggagtgggctgcggtttactacggccagcgtgcacagcgtccggggacaatgattatcacggaggcgacgttcatcagcccgcaggcaggtgggtacgataacaagcctggtatttggtcagacgaacagattgccgaatggaagaaaatcttcctggctattcatgactgtcagtcatttgcgtgggtgcaactgcaggtcctgggctgggccgcctttccggataccctggcgcgtgatgggttacgttacgattctgcctccgataatgtgtatatgaatgcggaactggaggaaaaagcgaaaaaagctaacaatccgcaacatagcattactaaagacgaaattaaacaatatgtcaaagaatatgttcaggcagctaagaactcgatcgctgcgggtgcggacggcgtggaaattcactcagccaacggttatctgttaaatcagttcctggatccgcacagcaacaaccgcaccgatgagtatgggggctcaattgaaaatcgtgcacgttttactctggaagtcgttgacgcggtggttgatgccatcggcccagaaaaagtgggtttacgtctgagtccgtacggcacgttcaactctatgtcgggcggcaaagaaacggtgattgttgctcagtatgcctatgtcctgggtgagctggagcgtcgcgccaaggcggggaaacgcctggcgtttgttcatttagtcgaaccacgcgtgacagacccttggctggttgagggggagggcgaatactcagagggcactaacgattttgcttattccatttggaaaggtccgattatccgtgccggcaactatgcactacatcctgaagtagtgcgcgaacaagttaaggaccctcgcaccctgatcggctacggccgcttctttatttcaaatccagacctggtttaccgcttagaagaaggtctgccactgaacaagtatgaccgttctagtttctacacccaaagcgcggagggttacatcgactacccaacctacgaagaagccgtagatctgggctggaacaaaaac

SEQ ID NO: 400 - protein, 400 aa, synthetic construct
  REGION 1..400: note = Variant of ERED chimera of Old Yellow Enzyme
MSFVKDFKPQALRDTNLFEPIKIGNTQLVHRVVMPPLTRMRATHPGHIPNKEWAAVYYGQRAQRPGTMIITEATFISPQAGGYDNKPGIWSDEQIAEWKKIFLAIHDCQSFAWVQLQVLGWAAFPDTLARDGLRYDSASDNVYMNAELEEKAKKANNPQHSITKDEIKQYVKEYVQAAKNSIAAGADGVEIHSANGYLLNQFLDPHSNNRTDEYGGSIENRARFTLEVVDAVVDAIGPEKVGLRLSPYGTFNSMSGGKETVIVAQYAYVLGELERRAKAGKRLAFVHLVEPRVTDPWLVEGEGEYSEGTNDFAYSIWKGPIIRAGNYALHPEVVREQVKDPRTLIGYGRFFISNPDLVYRLEEGLPLNKYDRSSFYTQSAEGYIDYPTYEEAVDLGWNKN

SEQ ID NO: 401 - DNA, 1200 bp, synthetic construct
  misc_feature 1..1200: note = Variant of ERED chimera of Old Yellow Enzyme
  source 1..1200: mol_type = other DNA
atgtctttcgttaaggactttaagccgcaagcactgcgcgacaccaacctgttcgaacctattaaaattgggaacacacagctggctcatcgcgttgtaatgcctccgctgacccgcatgcgcgctacccatccgggccatattccgaacaaggagtgggctgcggtttactacggccagcgtgcacagcgtccggggacaatgattatcacggaggcgacgttcatcagcccgcaggcaggtgggtacgataacaagcctggtatttggtcagacgaacagattgccgaatggaagaaaatcttcctggctattcatgactgtcagtcatttgcgtgggtgcaactgcaggtcctgggctgggccgcctttccggataccctggcgcgtgatgggttacgttacgattctgcctccgataatgtgtatatgaatgcggaactggaggaaaaagcgaaaaaagctaacaatccgcaacatagcattactaaagacgaaattaaacaatatgtcaaagaatatgttcaggcagctaagaactcgatcgctgcgggtgcggacggcgtggaaattcactcagccaacggttatctgttaaatcagttcctggatccgcacagcaacaaccgcaccgatgagtatgggggctcaattgaaaatcgtgcacgttttactctggaagtcgttgacgcggtggttgatgccatcggcccagaaaaagtgggtttacgtctgagtccgtacggcacgttcaactctatgtcgggcggcaaagaaacggtgattgttgctcagtatgcctatgtcctgggtgagctggagcgtcgcgccaaggcggggaaacgcctggcgtttgttcatttagtcgaaccacgcgtgacagacccttggctggttgagggggagggcgaatactcagagggcactaacgattttgcttattccatttggaaaggtccgattatccgtgccggcaactatgcactacatcctgaagtagtgcgcgaacaagttaaggaccctcgcaccctgatcggctacggccgcttctttatttcaaatccagacctggtttaccgcttagaagaaggtctgccactgaacaagtatgaccgttctagtttctacacccaaagcgcggagggttacatcgactacccaacctacgaagaagccgtagatctgggctgtaacaaaaac

SEQ ID NO: 402 - protein, 400 aa, synthetic construct
  REGION 1..400: note = Variant of ERED chimera of Old Yellow Enzyme
MSFVKDFKPQALRDTNLFEPIKIGNTQLAHRVVMPPLTRMRATHPGHIPNKEWAAVYYGQRAQRPGTMIITEATFISPQAGGYDNKPGIWSDEQIAEWKKIFLAIHDCQSFAWVQLQVLGWAAFPDTLARDGLRYDSASDNVYMNAELEEKAKKANNPQHSITKDEIKQYVKEYVQAAKNSIAAGADGVEIHSANGYLLNQFLDPHSNNRTDEYGGSIENRARFTLEVVDAVVDAIGPEKVGLRLSPYGTFNSMSGGKETVIVAQYAYVLGELERRAKAGKRLAFVHLVEPRVTDPWLVEGEGEYSEGTNDFAYSIWKGPIIRAGNYALHPEVVREQVKDPRTLIGYGRFFISNPDLVYRLEEGLPLNKYDRSSFYTQSAEGYIDYPTYEEAVDLGCNKN

SEQ ID NO: 403 - DNA, 1200 bp, synthetic construct
  misc_feature 1..1200: note = Variant of ERED chimera of Old Yellow Enzyme
  source 1..1200: mol_type = other DNA
atgtctttcgttaaggactttaagccgcaagcactgcgcgacaccaacctgttcgaacctattaaaattgggaacacacagctggctcatcgcgttgtaatgcctccgctgacccgcatgcgcgctacccatccgggccatattccgaacaaggagtgggctgcggtttactacggccagcgtgcacagcgtccggggacaatgattatcacggaggcgacgttcatcagcccgcaggcaggtgggtacgataacaagcctggtatttggtcagacgaacagattgccgaatggatgaaaatcttcctggctattcatgactgtcagtcatttgcgtgggtgcaactgcaggtcctgggctgggccgcctttccggataccctggcgcgtgatgggttacgttacgattctgcctccgataatgtgtatatgaatgcggaactggaggaaaaagcgaaaaaagctaacaatccgcaacatagcattactaaagacgaaattaaacaatatgtcaaagaatatgttcaggcagctaagaactcgatcgctgcgggtgcggacggcgtggaaattcactcagccaacggttatctgttaaatcagttcctggatccgcacagcaacaaccgcaccgatgagtatgggggctcaattgaaaatcgtgcacgttttactctggaagtcgttgacgcggtggttgatgccatcggcccagaaaaagtgggtttacgtctgagtccgtacggcacgttcaactctatgtcgggcggcaaagaaacggtgattgttgctcagtatgcctatgtcctgggtgagctggagcgtcgcgccaaggcggggaaacgcctggcgtttgttcatttagtcgaaccacgcgtgacagacccttggctggttgagggggagggcgaatactcagagggcactaacgattttgcttattccatttggaaaggtccgattatccgtgccggcaactatgcactacatcctgaagtagtgcgcgaacaagttaaggaccctcgcaccctgatcggctacggccgcttctttatttcaaatccagacctggtttaccgcttagaagaaggtctgccactgaacaagtatgaccgttctagtttctacacccaaagcgcggagggttacatcgactacccaacctacgaagaagccgtagatctgggctggaacaaaaac

SEQ ID NO: 404 - protein, 400 aa, synthetic construct
  REGION 1..400: note = Variant of ERED chimera of Old Yellow Enzyme
MSFVKDFKPQALRDTNLFEPIKIGNTQLAHRVVMPPLTRMRATHPGHIPNKEWAAVYYGQRAQRPGTMIITEATFISPQAGGYDNKPGIWSDEQIAEWMKIFLAIHDCQSFAWVQLQVLGWAAFPDTLARDGLRYDSASDNVYMNAELEEKAKKANNPQHSITKDEIKQYVKEYVQAAKNSIAAGADGVEIHSANGYLLNQFLDPHSNNRTDEYGGSIENRARFTLEVVDAVVDAIGPEKVGLRLSPYGTFNSMSGGKETVIVAQYAYVLGELERRAKAGKRLAFVHLVEPRVTDPWLVEGEGEYSEGTNDFAYSIWKGPIIRAGNYALHPEVVREQVKDPRTLIGYGRFFISNPDLVYRLEEGLPLNKYDRSSFYTQSAEGYIDYPTYEEAVDLGWNKN

SEQ ID NO: 405 - DNA, 1200 bp, synthetic construct
  misc_feature 1..1200: note = Variant of ERED chimera of Old Yellow Enzyme
  source 1..1200: mol_type = other DNA
atgtctttcgttaaggactttaagccgcaagcactgcgcgacaccaacctgttcgaacctattaaaattgggaacacacagctggctcatcgcgttgtaatgcctccgctgacccgcatgcgcgctacccatccgggccatattccgaacaaggagtgggctgcggtttactacggccagcgtgcacagcgtccggggacaatgattatcacggaggcgacgttcatcagcccgcaggcaggtgggtacgataacaagcctggtatttggtcagacgaacagattgccgaatggaagaaaatcttcctggctattcatgactgtcagtcatttgcgtgggtgcaactgcaggtcctgggctgggccgcctttccggataccctggcgcgtgatgggttacgttacgattctgcctccgataatgtgtatatgaatgcggaactggaggaaaaagcgaaaaaagctaacaatccgcaacatagcattactaaagacgaaattaaacaatatgtcaaagaatatgttcaggcagctaagaactcgatcgctgcgggtgcggacggcgtggaaattcactcagccaacggttatctgttaaatcagttcctggatccgcacagcaacaaccgcaccgatgagtatgggggctcaattgaaaatcgtgcacgttttactctggaagtcgttgacgcggtggttgatgccatcggcccagaaaaagtgggtttacgtctgagtccgtacggcacgttcaactctatgtcgggcggcaaagaaacggtgattgttgctcagtatgcctatgtcctgggtgagctggagcgtcgcgccaaggcggggaaacgcctggcgtttgttcatttagtcgaaccacgcgtgacagacccttggctggttgagggggagggcgaatactcagagggcactaacgattttgcttattccatttggaaaggtccgattatccgtgccggcaactatgcactacatcctgaagtagtgcgcgaacaagttaaggaccctcgcaccctgatcggctacggccgcttctttatttcaaatccagacctggtttaccgcttagaagaaggtctgccactgaacaagtatgaccgttctagtttctacacccaaagcgcggagggttacatcgactacccaacctacgaagaagccgaggatctgggctggaacaaaaac

SEQ ID NO: 406 - protein, 400 aa, synthetic construct
  REGION 1..400: note = Variant of ERED chimera of Old Yellow Enzyme
MSFVKDFKPQALRDTNLFEPIKIGNTQLAHRVVMPPLTRMRATHPGHIPNKEWAAVYYGQRAQRPGTMIITEATFISPQAGGYDNKPGIWSDEQIAEWKKIFLAIHDCQSFAWVQLQVLGWAAFPDTLARDGLRYDSASDNVYMNAELEEKAKKANNPQHSITKDEIKQYVKEYVQAAKNSIAAGADGVEIHSANGYLLNQFLDPHSNNRTDEYGGSIENRARFTLEVVDAVVDAIGPEKVGLRLSPYGTFNSMSGGKETVIVAQYAYVLGELERRAKAGKRLAFVHLVEPRVTDPWLVEGEGEYSEGTNDFAYSIWKGPIIRAGNYALHPEVVREQVKDPRTLIGYGRFFISNPDLVYRLEEGLPLNKYDRSSFYTQSAEGYIDYPTYEEAEDLGWNKN

SEQ ID NO: 407 - DNA, 1200 bp, synthetic construct
  misc_feature 1..1200: note = Variant of ERED chimera of Old Yellow Enzyme
  source 1..1200: mol_type = other DNA
atgtctttcgttaaggactttaagccgcaagcactgcgcgacaccaacctgttcgaacctattaaaattgggaacacacagctggctcatcgcgttgtaatgcctccgctgacccgcatgcgcgctacccatccgggccatattccgaacaaggagtgggctgcggtttactacggccagcgtgcacaggcgccggggacaatgattatcacggaggcgacgttcatcagcccgcaggcaggtgggtacgataacaagcctggtatttggtcagacgaacagattgccgaatggaagaaaatcttcctggctattcatgactgtcagtcatttgcgtgggtgcaactgcaggtcctgggctgggccgcctttccggataccctggcgcgtgatgggttacgttacgattctgcctccgataatgtgtatatgaatgcggaactggaggaaaaagcgaaaaaagctaacaatccgcaacatagcattactaaagacgaaattaaacaatatgtcaaagaatatgttcaggcagctaagaactcgatcgctgcgggtgcggacggcgtggaaattcactcagccaacggttatctgttaaatcagttcctggatccgcacagcaacaaccgcaccgatgagtatgggggctcaattgaaaatcgtgcacgttttactctggaagtcgttgacgcggtggttgatgccatcggcccagaaaaagtgggtttacgtctgagtccgtacggcacgttcaactctatgtcgggcggcaaagaaacggtgattgttgctcagtatgcctatgtcctgggtgagctggagcgtcgcgccaaggcggggaaacgcctggcgtttgttcatttagtcgaaccacgcgtgacagacccttggctggttgagggggagggcgaatactcagagggcactaacgattttgcttattccatttggaaaggtccgattatccgtgccggcaactatgcactacatcctgaagtagtgcgcgaacaagttaaggaccctcgcaccctgatcggctacggccgcttctttatttcaaatccagacctggtttaccgcttagaagaaggtctgccactgaacaagtatgaccgttctagtttctacacccaaagcgcggagggttacatcgactacccaacctacgaagaagccgtagatctgggctggaacaaaaac

SEQ ID NO: 408 - protein, 400 aa, synthetic construct
  REGION 1..400: note = Variant of ERED chimera of Old Yellow Enzyme
MSFVKDFKPQALRDTNLFEPIKIGNTQLAHRVVMPPLTRMRATHPGHIPNKEWAAVYYGQRAQAPGTMIITEATFISPQAGGYDNKPGIWSDEQIAEWKKIFLAIHDCQSFAWVQLQVLGWAAFPDTLARDGLRYDSASDNVYMNAELEEKAKKANNPQHSITKDEIKQYVKEYVQAAKNSIAAGADGVEIHSANGYLLNQFLDPHSNNRTDEYGGSIENRARFTLEVVDAVVDAIGPEKVGLRLSPYGTFNSMSGGKETVIVAQYAYVLGELERRAKAGKRLAFVHLVEPRVTDPWLVEGEGEYSEGTNDFAYSIWKGPIIRAGNYALHPEVVREQVKDPRTLIGYGRFFISNPDLVYRLEEGLPLNKYDRSSFYTQSAEGYIDYPTYEEAVDLGWNKN

SEQ ID NO: 409 - DNA, 1200 bp, synthetic construct
  misc_feature 1..1200: note = Variant of ERED chimera of Old Yellow Enzyme
  source 1..1200: mol_type = other DNA
atgtctttcgttaaggactttaagccgcaaggtctgcgcgacaccaacctgttcgaacctattaaaattgggaacacacagctggctcatcgcgttgtaatgcctccgctgacccgcatgcgcgctacccatccgggccatattccgaacaaggagtgggctgcggtttactacggccagcgtgcacagcgtccggggacaatgattatcacggaggcgacgttcatcagcccgcaggcaggtgggtacgataacaagcctggtatttggtcagacgaacagattgccgaatggaagaaaatcttcctggctattcatgactgtcagtcatttgcgtgggtgcaactgcaggtcctgggctgggccgcctttccggataccctggcgcgtgatgggttacgttacgattctgcctccgataatgtgtatatgaatgcggaactggaggaaaaagcgaaaaaagctaacaatccgcaacatagcattactaaagacgaaattaaacaatatgtcaaagaatatgttcaggcagctaagaactcgatcgctgcgggtgcggacggcgtggaaattcactcagccaacggttatctgttaaatcagttcctggatccgcacagcaacaaccgcaccgatgagtatgggggctcaattgaaaatcgtgcacgttttactctggaagtcgttgacgcggtggttgatgccatcggcccagaaaaagtgggtttacgtctgagtccgtacggcacgttcaactctatgtcgggcggcaaagaaacggtgattgttgctcagtatgcctatgtcctgggtgagctggagcgtcgcgccaaggcggggaaacgcctggcgtttgttcatttagtcgaaccacgcgtgacagacccttggctggttgagggggagggcgaatactcagagggcactaacgattttgcttattccatttggaaaggtccgattatccgtgccggcaactatgcactacatcctgaagtagtgcgcgaacaagttaaggaccctcgcaccctgatcggctacggccgcttctttatttcaaatccagacctggtttaccgcttagaagaaggtctgccactgaacaagtatgaccgttctagtttctacacccaaagcgcggagggttacatcgactacccaacctacgaagaagccgtagatctgggctggaacaaaaac

SEQ ID NO: 410 - protein, 400 aa, synthetic construct
  REGION 1..400: note = Variant of ERED chimera of Old Yellow Enzyme
MSFVKDFKPQGLRDTNLFEPIKIGNTQLAHRVVMPPLTRMRATHPGHIPNKEWAAVYYGQRAQRPGTMIITEATFISPQAGGYDNKPGIWSDEQIAEWKKIFLAIHDCQSFAWVQLQVLGWAAFPDTLARDGLRYDSASDNVYMNAELEEKAKKANNPQHSITKDEIKQYVKEYVQAAKNSIAAGADGVEIHSANGYLLNQFLDPHSNNRTDEYGGSIENRARFTLEVVDAVVDAIGPEKVGLRLSPYGTFNSMSGGKETVIVAQYAYVLGELERRAKAGKRLAFVHLVEPRVTDPWLVEGEGEYSEGTNDFAYSIWKGPIIRAGNYALHPEVVREQVKDPRTLIGYGRFFISNPDLVYRLEEGLPLNKYDRSSFYTQSAEGYIDYPTYEEAVDLGWNKN

SEQ ID NO: 411 - DNA, 1200 bp, synthetic construct
  misc_feature 1..1200: note = Variant of ERED chimera of Old Yellow Enzyme
  source 1..1200: mol_type = other DNA
atgtctttcgttaaggactttaagccacaagcactgcgcgacaccaacctgttcgaacctattaaaattgggaacacacagctggctcatcgcgttgtaatgcctccgctgacccgcatgcgcgctacccatccgggccatattccgaacaaggagtgggctgcggtttactacggccagcgtgcacagcgtccggggacaatgattatcacggaggcgacgttcatcagcccgcaggcaggtgggtacgataacaagcctggtatttggtcagacgaacagattgccgaatggaagaaaatcttcctggctattcatgactgtcagtcatttgcgtgggtgcaactgcaggtcctgggctgggccgcctttccggataccctggcgcgtgatgggttacgttacgattctgcctccgataatgtgtatatgaatgcggaactggaggaaaaagcgaaaaaagctaacaatccgcaacatagcattactaaagacgaaattaaacaatatgtcaaagaatatgttcaggcagctaagaactcgatcgctgcgggtgcggacggcgtggaaattcactcagccaacggttatctgttaaatcagttcctggatccgcacagcaacaaccgcaccgatgagtatgggggctcaattgaaaatcgtgcacgttttactctggaagtcgttgacgcggtggttgatgccatcggcccagaaaaagtgggtttacgtctgagtccgtacggcacgttcaactctatgtcgggcggcaaagaaacggtgattgttgctcagtatgcctatgtcctgggtgagctggagcgtcgcgccaaggcggggaaacgcctggcgtttgttcatttagtcgaaccacgcgtgacagacccttggctggttgagggggagggcgaatactcagagggcactaacgattttgcttattccatttggaaaggtccgattatccgtgccggcaactatgcactacatcctgaagtagtgcgcgaacaagttaaggaccctcgcaccctgatcggctacggccgcttctttatttcaaatccagacctggtttaccgcttagaagaaggtctgccactgaacaagtatgaccgttctagtttctacacccaaagcgcggagggttacatcgactacccagtttacgaagaagccgtagatctgggctggaacaaaaac

SEQ ID NO: 412 - protein, 400 aa, synthetic construct
  REGION 1..400: note = Variant of ERED chimera of Old Yellow Enzyme
MSFVKDFKPQALRDTNLFEPIKIGNTQLAHRVVMPPLTRMRATHPGHIPNKEWAAVYYGQRAQRPGTMIITEATFISPQAGGYDNKPGIWSDEQIAEWKKIFLAIHDCQSFAWVQLQVLGWAAFPDTLARDGLRYDSASDNVYMNAELEEKAKKANNPQHSITKDEIKQYVKEYVQAAKNSIAAGADGVEIHSANGYLLNQFLDPHSNNRTDEYGGSIENRARFTLEVVDAVVDAIGPEKVGLRLSPYGTFNSMSGGKETVIVAQYAYVLGELERRAKAGKRLAFVHLVEPRVTDPWLVEGEGEYSEGTNDFAYSIWKGPIIRAGNYALHPEVVREQVKDPRTLIGYGRFFISNPDLVYRLEEGLPLNKYDRSSFYTQSAEGYIDYPVYEEAVDLGWNKN

SEQ ID NO: 413 - DNA, 1200 bp, synthetic construct
  misc_feature 1..1200: note = Variant of ERED chimera of Old Yellow Enzyme
  source 1..1200: mol_type = other DNA
atgtctttcgttaaggactttaagccgcaagcactgcgcgacaccaacctgttcgaacctattaaaattgggaacacacagctggctcatcgcgttgtaatgcctccgctgacccgcatgcgcgctacccatccgggccatattccgaacaaggagtgggctgcggtttactacggccagcgtgcacagcgtccggggacaatgattatcacggaggcgacgttcatcagcccgcaggcaggtgggtacgataacaagcctggtatttggtcagacgaacagattgccgaatgggtgaaaatcttcctggctattcatgactgtcagtcatttgcgtgggtgcaactgcaggtcctgggctgggccgcctttccggataccctggcgcgtgatgggttacgttacgattctgcctccgataatgtgtatatgaatgcggaactggaggaaaaagcgaaaaaagctaacaatccgcaacatagcattactaaagacgaaattaaacaatatgtcaaagaatatgttcaggcagctaagaactcgatcgctgcgggtgcggacggcgtggaaattcactcagccaacggttatctgttaaatcagttcctggatccgcacagcaacaaccgcaccgatgagtatgggggctcaattgaaaatcgtgcacgttttactctggaagtcgttgacgcggtggttgatgccatcggcccagaaaaagtgggtttacgtctgagtccgtacggcacgttcaactctatgtcgggcggcaaagaaacggtgattgttgctcagtatgcctatgtcctgggtgagctggagcgtcgcgccaaggcggggaaacgcctggcgtttgttcatttagtcgaaccacgcgtgacagacccttggctggttgagggggagggcgaatactcagagggcactaacgattttgcttattccatttggaaaggtccgattatccgtgccggcaactatgcactacatcctgaagtagtgcgcgaacaagttaaggaccctcgcaccctgatcggctacggccgcttctttatttcaaatccagacctggtttaccgcttagaagaaggtctgccactgaacaagtatgaccgttctagtttctacacccaaagcgcggagggttacatcgactacccaacctacgaagaagccgtagatctgggctggaaaaaaaac

SEQ ID NO: 414 - protein, 400 aa, synthetic construct
  REGION 1..400: note = Variant of ERED chimera of Old Yellow Enzyme
MSFVKDFKPQALRDTNLFEPIKIGNTQLAHRVVMPPLTRMRATHPGHIPNKEWAAVYYGQRAQRPGTMIITEATFISPQAGGYDNKPGIWSDEQIAEWVKIFLAIHDCQSFAWVQLQVLGWAAFPDTLARDGLRYDSASDNVYMNAELEEKAKKANNPQHSITKDEIKQYVKEYVQAAKNSIAAGADGVEIHSANGYLLNQFLDPHSNNRTDEYGGSIENRARFTLEVVDAVVDAIGPEKVGLRLSPYGTFNSMSGGKETVIVAQYAYVLGELERRAKAGKRLAFVHLVEPRVTDPWLVEGEGEYSEGTNDFAYSIWKGPIIRAGNYALHPEVVREQVKDPRTLIGYGRFFISNPDLVYRLEEGLPLNKYDRSSFYTQSAEGYIDYPTYEEAVDLGWKKN

SEQ ID NO: 415 - DNA, 1200 bp, synthetic construct
  misc_feature 1..1200: note = Variant of ERED chimera of Old Yellow Enzyme
  source 1..1200: mol_type = other DNA
atgtctttcgttaaggactttaagccgcaagcactgcgcgacaccaacctgttcgaacctattaaaattgggaacacacagctggctcatcgcgttgtaatgcctccgctgacccgcatgcgcgctacccatccgggccatattccgaacaaggagtgggctgcggtttactacggccagcgtgcacagcgtccggggacaatgattatcacggaggcgacgttcatcagcccgcaggcaggtgggtacgataacaagcctggtatttggtcagacgaacagattgccgaatggaagaaaatcttcctggctattcatgactgtcagtcatttgcgtgggtgcaactgcaggtcctgggctgggccgcctttccggataccctggcgcgtgatgggttacgttacgattctgcctccgataatgtgtatatgaatgcggaactggaggaaaaagcgaaaaaagctaacaatccgcaacatagcattactaaagacgaaattaaacaatatgtcaaagaatatgttcaggcagctaagaactcgatcgctgcgggtgcggacggcgtggaaattcactcagccaacggttatctgttaaatcagttcctggatccgcacagcaacaaccgcaccgatgagtatgggggctcaattgaaaatcgtgcacgttttactctggaagtcgttgacgcggtggttgatgccatcggcccagaaaaagtgggtttacgtctgagtccgtacggcacgttcaactctatgtcgggcggcaaagaaacggtgattgttgctcagtatgcctatgtcctgggtgagctggagcgtcgcgccaaggcggggaaacgcctggcgtttgttcatttagtcgaaccacgcgtgacagacccttggctggttgagggggagggcgaatactcagagggcactaacgattttgcttattccatttggaaaggtccgattatccgtgccggcaactatgcactacatcctgaacaggtgcgcgaacaagttaaggaccctcgcaccctgatcggctacggccgcttctttatttcaaatccagacctggtttaccgcttagaagaaggtctgccactgaacaagtatgaccgttctagtttctacacccaaagcgcggagggttacatcgactacccaacctacgaagaagccgtagatctgggctggaacaaaaac

SEQ ID NO: 416 - protein, 400 aa, synthetic construct
  REGION 1..400: note = Variant of ERED chimera of Old Yellow Enzyme
MSFVKDFKPQALRDTNLFEPIKIGNTQLAHRVVMPPLTRMRATHPGHIPNKEWAAVYYGQRAQRPGTMIITEATFISPQAGGYDNKPGIWSDEQIAEWKKIFLAIHDCQSFAWVQLQVLGWAAFPDTLARDGLRYDSASDNVYMNAELEEKAKKANNPQHSITKDEIKQYVKEYVQAAKNSIAAGADGVEIHSANGYLLNQFLDPHSNNRTDEYGGSIENRARFTLEVVDAVVDAIGPEKVGLRLSPYGTFNSMSGGKETVIVAQYAYVLGELERRAKAGKRLAFVHLVEPRVTDPWLVEGEGEYSEGTNDFAYSIWKGPIIRAGNYALHPEQVREQVKDPRTLIGYGRFFISNPDLVYRLEEGLPLNKYDRSSFYTQSAEGYIDYPTYEEAVDLGWNKN

SEQ ID NO: 417 - DNA, 1200 bp, synthetic construct
  misc_feature 1..1200: note = Variant of ERED chimera of Old Yellow Enzyme
  source 1..1200: mol_type = other DNA
atgtctttcgttaaggactttaagccgcaagcactgcgcgacaccaacctgttcgaacctattaaaattgggaacacacagctggctcatcgcgttgtaatgcctccgctgacccgcatgcgcgctacccatccgggccatattccgaacaaggagtgggctgcggtttactacggccagcgtgcacagcgtccggggacaatgattatcacggaggcgacgttcatcagcccgcaggcaggtgggtacgataacaagcctggtatttggtcagacgaacagattgccgaatggaagaaaatcttcctggctattcatgactgtcagtcatttgcgtgggtgcaactgcaggtcctgggctgggccgcctttccggataccctggcgcgtgatgggttacgttacgattctgcctccgataatgtgtatatgaatgcggaactggaggaaaaagcgaaaaaagctaacaatccgcaacatagcattactaaagacgaaattaaacaatatgtcaaagaatatgttcaggcagctaagaactcgatcgctgcgggtgcggacggcgtggaaattcactcagccaacggttatctgttaaatcagttcctggatccgcacagcaacaaccgcaccgatgagtatgggggctcaattgaaaatcgtgcacgttttactctggaagtcgttgacgcggtggttgatgccatcggcccagaaaaagtgggtttacgtctgagtccgtacggcacgttcaactctatgtcgggcggcaaagaaacggtgattgttgctcagtatgcctatgtcctgggtgagctggagcgtcgcgccaaggcggggaaacgcctggcgtttgttcatttagtcgaaccacgcgtgacagacccttggctggttgagggggagggcgaatactcagagggcactaacgattttgcttattccatttggaaaggtccgattatccgtgccggcaactatgcactacatcctgaagtagtgcgcgaacaagttaaggaccctcgcaccctgatcggctacggccgcttctttatttcaaatccagacctggtttaccgcttagaagaaggtctgccactgaacaagtatgaccgttctagtttctacacccaaagcgcggagggttacatcgactacccaacctacgaagaagccgtagatctgggcgataacaaaaac

SEQ ID NO: 418 - protein, 400 aa, synthetic construct
  REGION 1..400: note = Variant of ERED chimera of Old Yellow Enzyme
MSFVKDFKPQALRDTNLFEPIKIGNTQLAHRVVMPPLTRMRATHPGHIPNKEWAAVYYGQRAQRPGTMIITEATFISPQAGGYDNKPGIWSDEQIAEWKKIFLAIHDCQSFAWVQLQVLGWAAFPDTLARDGLRYDSASDNVYMNAELEEKAKKANNPQHSITKDEIKQYVKEYVQAAKNSIAAGADGVEIHSANGYLLNQFLDPHSNNRTDEYGGSIENRARFTLEVVDAVVDAIGPEKVGLRLSPYGTFNSMSGGKETVIVAQYAYVLGELERRAKAGKRLAFVHLVEPRVTDPWLVEGEGEYSEGTNDFAYSIWKGPIIRAGNYALHPEVVREQVKDPRTLIGYGRFFISNPDLVYRLEEGLPLNKYDRSSFYTQSAEGYIDYPTYEEAVDLGDNKN

SEQ ID NO: 419 - DNA, 1200 bp, synthetic construct
  misc_feature 1..1200: note = Variant of ERED chimera of Old Yellow Enzyme
  source 1..1200: mol_type = other DNA
atgtctttcgttaaggactttaagccgcaagcactgcaggacaccaacctgttcgaacctattaaaattgggaacacacagctggctcatcgcgttgtaatgcctccgctgacccgcatgcgcgctacccatccgggccatattccgaacaaggagtgggctgcggtttactacggccagcgtgcacagcgtccggggacaatgattatcacggaggcgacgttcatcagcccgcaggcaggtgggtacgataacaagcctggtatttggtcagacgaacagattgccgaatggaagaaaatcttcctggctattcatgactgtcagtcatttgcgtgggtgcaactgcaggtcctgggctgggccgcctttccggataccctggcgcgtgatgggttacgttacgattctgcctccgataatgtgtatatgaatgcggaactggaggaaaaagcgaaaaaagctaacaatccgcaacatagcattactaaagacgaaattaaacaatatgtcaaagaatatgttcaggcagctaagaactcgatcgctgcgggtgcggacggcgtggaaattcactcagccaacggttatctgttaaatcagttcctggatccgcacagcaacaaccgcaccgatgagtatgggggctcaattgaaaatcgtgcacgttttactctggaagtcgttgacgcggtggttgatgccatcggcccagaaaaagtgggtttacgtctgagtccgtacggcacgttcaactctatgtcgggcggcaaagaaacggtgattgttgctcagtatgcctatgtcctgggtgagctggagcgtcgcgccaaggcggggaaacgcctggcgtttgttcatttagtcgaaccacgcgtgacagacccttggctggttgagggggagggcgaatactcagagggcactaacgattttgcttattccatttggaaaggtccgattatccgtgccggcaactatgcactacatcctgaagtagtgcgcgaacaagttaaggaccctcgcaccctgatcggctacggccgcttctttatttcaaatccagacctggtttaccgcttagaagaaggtctgccactgaacaagtatgaccgttctagtttctacacccaaagcgcggagggttacatcgactacccaacctacgaagaagccgtagatctgggctggaacaaaaac

SEQ ID NO: 420 - protein, 400 aa, synthetic construct
  REGION 1..400: note = Variant of ERED chimera of Old Yellow Enzyme
MSFVKDFKPQALQDTNLFEPIKIGNTQLAHRVVMPPLTRMRATHPGHIPNKEWAAVYYGQRAQRPGTMIITEATFISPQAGGYDNKPGIWSDEQIAEWKKIFLAIHDCQSFAWVQLQVLGWAAFPDTLARDGLRYDSASDNVYMNAELEEKAKKANNPQHSITKDEIKQYVKEYVQAAKNSIAAGADGVEIHSANGYLLNQFLDPHSNNRTDEYGGSIENRARFTLEVVDAVVDAIGPEKVGLRLSPYGTFNSMSGGKETVIVAQYAYVLGELERRAKAGKRLAFVHLVEPRVTDPWLVEGEGEYSEGTNDFAYSIWKGPIIRAGNYALHPEVVREQVKDPRTLIGYGRFFISNPDLVYRLEEGLPLNKYDRSSFYTQSAEGYIDYPTYEEAVDLGWNKN

SEQ ID NO: 421 - DNA, 1200 bp, synthetic construct
  misc_feature 1..1200: note = Variant of ERED chimera of Old Yellow Enzyme
  source 1..1200: mol_type = other DNA
atgtctttcgttaaggactttaagccgcaagcactgcgcgacaccaacctgttcgaacctattaaaattgggaacacacagctggctcatcgcgttgtaatgcctccgctgacccgcatgcgcgctacccatccgggccatattccgaacaaggagtgggctgcggtttactacggccagcgtgcacagcgtccggggacaatgattatcacggaggcgacgttcatcagcccgcaggcaggtgggtacgataacaagcctggtatttggtcagacgaacagattgccgaatggaagaaaatcttcctggctattcatgactgtcagtcatttgcgtgggtgcaactgcaggtcctgggctgggccgcctttccggataccctggcgcgtgatgggttacgttacgattctgcctccgataatgtgtatatgaatgcggaactggaggaaaaagcgaaaaaagctaacaatccgcaacatagcattactaaagacgaaattaaacaatatgtcaaagaatatgttcaggcagctaagaactcgatcgctgcgggtgcggacggcgtggaaattcactcagccaacggttatctgttaaatcagttcctggatccgcacagcaacaaccgcaccgatgagtatgggggctcaattgaaaatcgtgcacgttttactctggaagtcgttgacgcggtggttgatgccatcggcccagaaaaagtgggtttacgtctgagtccgtacggcacgttcaactctatgtcgggcggcaaagaaacggtgattgttgctcagtatgcctatgtcctgggtgagctggagcgtcgcgccaaggcggggaaacgcctggcgtttgttcatttagtcgaaccacgcgtgacagacccttggctggttgagggggagggcgaatactcagagggcactaacgattttgcttattccatttggaaaggtccgattatccgtgccggcaactatgcactacatcctgaagtagtgcgcgaacaagttaaggaccctcgcaccctgatcggctacggccgcttctttatttcaaatccagacctggtttaccgcttagaagaaggtctgccactgaacaagtatgaccgttctagtttctacacccaaagcgcggagggttacatcgactacccaacctacgaagaagccacggatctgggctggaacaaaaac

SEQ ID NO: 422 - protein, 400 aa, synthetic construct
  REGION 1..400: note = Variant of ERED chimera of Old Yellow Enzyme
MSFVKDFKPQALRDTNLFEPIKIGNTQLAHRVVMPPLTRMRATHPGHIPNKEWAAVYYGQRAQRPGTMIITEATFISPQAGGYDNKPGIWSDEQIAEWKKIFLAIHDCQSFAWVQLQVLGWAAFPDTLARDGLRYDSASDNVYMNAELEEKAKKANNPQHSITKDEIKQYVKEYVQAAKNSIAAGADGVEIHSANGYLLNQFLDPHSNNRTDEYGGSIENRARFTLEVVDAVVDAIGPEKVGLRLSPYGTFNSMSGGKETVIVAQYAYVLGELERRAKAGKRLAFVHLVEPRVTDPWLVEGEGEYSEGTNDFAYSIWKGPIIRAGNYALHPEVVREQVKDPRTLIGYGRFFISNPDLVYRLEEGLPLNKYDRSSFYTQSAEGYIDYPTYEEATDLGWNKN

SEQ ID NO: 423 - DNA, 1200 bp, synthetic construct
  misc_feature 1..1200: note = Variant of ERED chimera of Old Yellow Enzyme
  source 1..1200: mol_type = other DNA
atgtctttcgttaaggactttaagccgcaagcactgcgcgacaccaacctgttcgaacctctgaaaattgggaacacacagctggctcatcgcgttgtaatgcctccgctgacccgcatgcgcgctacccatccgggccatattccgaacaaggagtgggctgcggtttactacggccagcgtgcacagcgtccggggacaatgattatcacggaggcgacgttcatcagcccgcaggcaggtgggtacgataacaagcctggtatttggtcagacgaacagattgccgaatggaagaaaatcttcctggctattcatgactgtcagtcatttgcgtgggtgcaactgcaggtcctgggctgggccgcctttccggataccctggcgcgtgatgggttacgttacgattctgcctccgataatgtgtatatgaatgcggaactggaggaaaaagcgaaaaaagctaacaatccgcaacatagcattactaaagacgaaattaaacaatatgtcaaagaatatgttcaggcagctaagaactcgatcgctgcgggtgcggacggcgtggaaattcactcagccaacggttatctgttaaatcagttcctggatccgcacagcaacaaccgcaccgatgagtatgggggctcaattgaaaatcgtgcacgttttactctggaagtcgttgacgcggtggttgatgccatcggcccagaaaaagtgggtttacgtctgagtccgtacggcacgttcaactctatgtcgggcggcaaagaaacggtgattgttgctcagtatgcctatgtcctgggtgagctggagcgtcgcgccaaggcggggaaacgcctggcgtttgttcatttagtcgaaccacgcgtgacagacccttggctggttgagggggagggcgaatactcagagggcactaacgattttgcttattccatttggaaaggtccgattatccgtgccggcaactatgcactacatcctgaagtagtgcgcgaacaagttaaggaccctcgcaccctgatcggctacggccgcttctttatttcaaatccagacctggtttaccgcttagaagaaggtctgccactgaacaagtatgaccgttctagtttctacacccaaagcgcggagggttacatcgactacccaacctacgaagaagccgtagatctgggctggaacaaaaac

SEQ ID NO: 424 - protein, 400 aa, synthetic construct
  REGION 1..400: note = Variant of ERED chimera of Old Yellow Enzyme
MSFVKDFKPQALRDTNLFEPLKIGNTQLAHRVVMPPLTRMRATHPGHIPNKEWAAVYYGQRAQRPGTMIITEATFISPQAGGYDNKPGIWSDEQIAEWKKIFLAIHDCQSFAWVQLQVLGWAAFPDTLARDGLRYDSASDNVYMNAELEEKAKKANNPQHSITKDEIKQYVKEYVQAAKNSIAAGADGVEIHSANGYLLNQFLDPHSNNRTDEYGGSIENRARFTLEVVDAVVDAIGPEKVGLRLSPYGTFNSMSGGKETVIVAQYAYVLGELERRAKAGKRLAFVHLVEPRVTDPWLVEGEGEYSEGTNDFAYSIWKGPIIRAGNYALHPEVVREQVKDPRTLIGYGRFFISNPDLVYRLEEGLPLNKYDRSSFYTQSAEGYIDYPTYEEAVDLGWNKN

SEQ ID NO: 425 - DNA, 1200 bp, synthetic construct
  misc_feature 1..1200: note = Variant of ERED chimera of Old Yellow Enzyme
  source 1..1200: mol_type = other DNA
atgtctttcgttaaggactttaagccgagggcactgcgcgacaccaacctgttcgaacctattaaaattgggaacacacagctggctcatcgcgttgtaatgcctccgctgacccgcatgcgcgctacccatccgggccatattccgaacaaggagtgggctgcggtttactacggccagcgtgcacagcgtccggggacaatgattatcacggaggcgacgttcatcagcccgcaggcaggtgggtacgataacaagcctggtatttggtcagacgaacagattgccgaatggaagaaaatcttcctggctattcatgactgtcagtcatttgcgtgggtgcaactgcaggtcctgggctgggccgcctttccggataccctggcgcgtgatgggttacgttacgattctgcctccgataatgtgtatatgaatgcggaactggaggaaaaagcgaaaaaagctaacaatccgcaacatagcattactaaagacgaaattaaacaatatgtcaaagaatatgttcaggcagctaagaactcgatcgctgcgggtgcggacggcgtggaaattcactcagccaacggttatctgttaaatcagttcctggatccgcacagcaacaaccgcaccgatgagtatgggggctcaattgaaaatcgtgcacgttttactctggaagtcgttgacgcggtggttgatgccatcggcccagaaaaagtgggtttacgtctgagtccgtacggcacgttcaactctatgtcgggcggcaaagaaacggtgattgttgctcagtatgcctatgtcctgggtgagctggagcgtcgcgccaaggcggggaaacgcctggcgtttgttcatttagtcgaaccacgcgtgacagacccttggctggttgagggggagggcgaatactcagagggcactaacgattttgcttattccatttggaaaggtccgattatccgtgccggcaactatgcactacatcctgaagtagtgcgcgaacaagttaaggaccctcgcaccctgatcggctacggccgcttctttatttcaaatccagacctggtttaccgcttagaagaaggtctgccactgaacaagtatgaccgttctagtttctacacccaaagcgcggagggttacatcgactacccaacctacgaagaagccgtagatctgggctggaacaaaaac

SEQ ID NO: 426 - protein, 400 aa, synthetic construct
  REGION 1..400: note = Variant of ERED chimera of Old Yellow Enzyme
MSFVKDFKPRALRDTNLFEPIKIGNTQLAHRVVMPPLTRMRATHPGHIPNKEWAAVYYGQRAQRPGTMIITEATFISPQAGGYDNKPGIWSDEQIAEWKKIFLAIHDCQSFAWVQLQVLGWAAFPDTLARDGLRYDSASDNVYMNAELEEKAKKANNPQHSITKDEIKQYVKEYVQAAKNSIAAGADGVEIHSANGYLLNQFLDPHSNNRTDEYGGSIENRARFTLEVVDAVVDAIGPEKVGLRLSPYGTFNSMSGGKETVIVAQYAYVLGELERRAKAGKRLAFVHLVEPRVTDPWLVEGEGEYSEGTNDFAYSIWKGPIIRAGNYALHPEVVREQVKDPRTLIGYGRFFISNPDLVYRLEEGLPLNKYDRSSFYTQSAEGYIDYPTYEEAVDLGWNKN

SEQ ID NO: 427 - DNA, 1200 bp, synthetic construct
  misc_feature 1..1200: note = Variant of ERED chimera of Old Yellow Enzyme
  source 1..1200: mol_type = other DNA
atgtctttcgttaaggactttaagccgcaagcactgcgcgacaccaacctgttcgaacctattaaaattgggaacacacagctggctcatcgcgttgtaatgcctccgctgacccgcatgcgcgctacccatccgggccatattccgaacaaggagtgggctgcggtttactacggccagcgtgcacaggagccggggacaatgattatcacggaggcgacgttcatcagcccgcaggcaggtgggtacgataacaagcctggtatttggtcagacgaacagattgccgaatggaagaaaatcttcctggctattcatgactgtcagtcatttgcgtgggtgcaactgcaggtcctgggctgggccgcctttccggataccctggcgcgtgatgggttacgttacgattctgcctccgataatgtgtatatgaatgcggaactggaggaaaaagcgaaaaaagctaacaatccgcaacatagcattactaaagacgaaattaaacaatatgtcaaagaatatgttcaggcagctaagaactcgatcgctgcgggtgcggacggcgtggaaattcactcagccaacggttatctgttaaatcagttcctggatccgcacagcaacaaccgcaccgatgagtatgggggctcaattgaaaatcgtgcacgttttactctggaagtcgttgacgcggtggttgatgccatcggcccagaaaaagtgggtttacgtctgagtccgtacggcacgttcaactctatgtcgggcggcaaagaaacggtgattgttgctcagtatgcctatgtcctgggtgagctggagcgtcgcgccaaggcggggaaacgcctggcgtttgttcatttagtcgaaccacgcgtgacagacccttggctggttgagggggagggcgaatactcagagggcactaacgattttgcttattccatttggaaaggtccgattatccgtgccggcaactatgcactacatcctgaagtagtgcgcgaacaagttaaggaccctcgcaccctgatcggctacggccgcttctttatttcaaatccagacctggtttaccgcttagaagaaggtctgccactgaacaagtatgaccgttctagtttctacacccaaagcgcggagggttacatcgactacccaacctacgaagaagccgtagatctgggctggaacaaaaac

SEQ ID NO: 428 - protein, 400 aa, synthetic construct
  REGION 1..400: note = Variant of ERED chimera of Old Yellow Enzyme
MSFVKDFKPQALRDTNLFEPIKIGNTQLAHRVVMPPLTRMRATHPGHIPNKEWAAVYYGQRAQEPGTMIITEATFISPQAGGYDNKPGIWSDEQIAEWKKIFLAIHDCQSFAWVQLQVLGWAAFPDTLARDGLRYDSASDNVYMNAELEEKAKKANNPQHSITKDEIKQYVKEYVQAAKNSIAAGADGVEIHSANGYLLNQFLDPHSNNRTDEYGGSIENRARFTLEVVDAVVDAIGPEKVGLRLSPYGTFNSMSGGKETVIVAQYAYVLGELERRAKAGKRLAFVHLVEPRVTDPWLVEGEGEYSEGTNDFAYSIWKGPIIRAGNYALHPEVVREQVKDPRTLIGYGRFFISNPDLVYRLEEGLPLNKYDRSSFYTQSAEGYIDYPTYEEAVDLGWNKN

SEQ ID NO: 429 - DNA, 1200 bp, synthetic construct
  misc_feature 1..1200: note = Variant of ERED chimera of Old Yellow Enzyme
  source 1..1200: mol_type = other DNA
atgtctttcgttaaggactttaagccgcaagcactgcgcgacaccaacctgttcgaacctattaaaattgggaacacacagctggctcatcgcgttgtaatgcctccgctgacccgcatgcgcgctacccatccgggccatattccgaacaaggagtgggctgcggtttactacggccagcgtgcacagcgtccggggacaatgattatcacggaggcgacgttcatcagcccgcaggcaggtgggtacgataacaagcctggtatttggtcagacgaacagattgccgaatggaagaaaatcttcctggctattcatgactgtcagtcatttgcgtgggtgcaactgcaggtcctgggctgggccgcctttccggataccctggcgcgtgatgggttacgttacgattctgcctccgataatgtgtatatgaatgcggaactggaggaaaaagcgaaaaaagctaacaatccgcaacatagcattactaaagacgaaattaaacaatatgtcaaagaatatgttcaggcagctaagaactcgatcgctgcgggtgcggacggcgtggaaattcactcagccaacggttatctgttaaatcagttcctggatccgcacagcaacaaccgcaccgatgagtatgggggctcaattgaaaatcgtgcacgttttactctggaagtcgttgacgcggtggttgatgccatcggcccagaaaaagtgggtatgcgtctgagtccgtacggcacgttcaactctatgtcgggcggcaaagaaacggtgattgttgctcagtatgcctatgtcctgggtgagctggagcgtcgcgccaaggcggggaaacgcctggcgtttgttcatttagtcgaaccacgcgtgacagacccttggctggttgagggggagggcgaatactcagagggcactaacgattttgcttattccatttggaaaggtccgattatccgtgccggcaactatgcactacatcctgaagtagtgcgcgaacaagttaaggaccctcgcaccctgatcggctacggccgcttctttatttcaaatccagacctggtttaccgcttagaagaaggtctgccactgaacaagtatgaccgttctagtttctacacccaaagcgcggagggttacatcgactacccaacctacgaagaagccgtagatctgggctggaacaaaaac

SEQ ID NO: 430 - protein, 400 aa, synthetic construct
  REGION 1..400: note = Variant of ERED chimera of Old Yellow Enzyme
MSFVKDFKPQALRDTNLFEPIKIGNTQLAHRVVMPPLTRMRATHPGHIPNKEWAAVYYGQRAQRPGTMIITEATFISPQAGGYDNKPGIWSDEQIAEWKKIFLAIHDCQSFAWVQLQVLGWAAFPDTLARDGLRYDSASDNVYMNAELEEKAKKANNPQHSITKDEIKQYVKEYVQAAKNSIAAGADGVEIHSANGYLLNQFLDPHSNNRTDEYGGSIENRARFTLEVVDAVVDAIGPEKVGMRLSPYGTFNSMSGGKETVIVAQYAYVLGELERRAKAGKRLAFVHLVEPRVTDPWLVEGEGEYSEGTNDFAYSIWKGPIIRAGNYALHPEVVREQVKDPRTLIGYGRFFISNPDLVYRLEEGLPLNKYDRSSFYTQSAEGYIDYPTYEEAVDLGWNKN

SEQ ID NO: 431 - DNA, 759 bp, synthetic construct
  misc_feature 1..759: note = Variant of Ketone Reductase from L. kefir
  source 1..759: mol_type = other DNA
atgaccgatcgtctgaagggcaaagtagccatcgtaaccggcgggactctgggtatcggtttggcaatcgccgataaatttgtagaggagggtgcgaaagtagttattactggtcgtcacgcggatgtaggtgaaaaggccgccaaatcaatcggcggcactgatgttattcgctttgtccagcacgatgcatccgatgaagcaggctggacgaaactgttcgacaccaccgaggaggcattcggcccggttacgaccgtcgtgaacaatgcagggattgcagtttccaaaagcgttgaagacactaccacggaggaatggcgtaaactgctgtccgttaatctggatggtgtttttttcggcacccgtctgggcattcagcgcatgaaaaataaaggcttgggcgctagcatcatcaatatgagcagtattgctgggctcgtaggcgatccgacgctgggggcatacaacgcttccaagggggcggtacgtatcatgtcgaaaagcgcagcgctggattgcgcactgaaggactacgatgtgcgtgtcaacacagtacatccgggcgaaatcaagaccccgctggtcgatgatctggaaggtgctgaggaaatgatgtcacagcgtacgaaaacccctatgggccacattggcgaaccgaatgacatcgcatggatctgtgtgtacctggcatctgacgaatcgaaatttgcgacgggtgcagaatttgtggtcgacggcgggtataccgcacagtga

SEQ ID NO: 432 - protein, 252 aa, synthetic construct
  REGION 1..252: note = Variant of Ketone Reductase from L. kefir
MTDRLKGKVAIVTGGTLGIGLAIADKFVEEGAKVVITGRHADVGEKAAKSIGGTDVIRFVQHDASDEAGWTKLFDTTEEAFGPVTTVVNNAGIAVSKSVEDTTTEEWRKLLSVNLDGVFFGTRLGIQRMKNKGLGASIINMSSIAGLVGDPTLGAYNASKGAVRIMSKSAALDCALKDYDVRVNTVHPGEIKTPLVDDLEGAEEMMSQRTKTPMGHIGEPNDIAWICVYLASDESKFATGAEFVVDGGYTAQ

SEQ ID NO: 433 - DNA, 756 bp, synthetic construct
  misc_feature 1..756: note = Variant of Ketone Reductase from L. kefir
  source 1..756: mol_type = other DNA
atgaccgatcgtctgaagggcaaagtagccatcgtaaccggcgggactctgggtatcggtaaagcaatcgccgataaatttgtagaggagggtgcgaaagtagttattactggtcgtcacgcggatgtaggtgaaaaggccgccaaatcaatcggcggcactgatgttattcgctttgtccagcacgatgcatccgatgaagcaggctggacgacgctgttcgacaccaccgaggaggcattcggcccggttacgaccgtcgtgaacaatgcagggattgcagtttccaaaagcgttgaagacactgacacggaggaatggcgtaaactgctgtccgttaatctggatggtgtttttttcggcacccgtctgggcattcagcgcatgaaaaataaaggcttgggcgctagcatcatcaatatgagcagtattgctgggattgtaggcgatccgacgctgggggcatacaacgcttccaagggggcggtacgtatcatgtcgaaaagcgcagcgctggattgcgcactgaaggactacgatgtgcgtgtcaacacagtacatccgggcgaaatcaagaccccactggtcgatgatctggaaggtgctgaggaaatgatgtcacagcgtacgaaaacccctatgggccacattggcgaaccgaatgacatcgcatggatctgtgtgtacctggcatctgacgaatcgaaatttgcgacgggtgcagaatttgtggtcgacggcgggtataccgcacag

SEQ ID NO: 434 - protein, 252 aa, synthetic construct
  REGION 1..252: note = Variant of Ketone Reductase from L. kefir
MTDRLKGKVAIVTGGTLGIGKAIADKFVEEGAKVVITGRHADVGEKAAKSIGGTDVIRFVQHDASDEAGWTTLFDTTEEAFGPVTTVVNNAGIAVSKSVEDTDTEEWRKLLSVNLDGVFFGTRLGIQRMKNKGLGASIINMSSIAGIVGDPTLGAYNASKGAVRIMSKSAALDCALKDYDVRVNTVHPGEIKTPLVDDLEGAEEMMSQRTKTPMGHIGEPNDIAWICVYLASDESKFATGAEFVVDGGYTAQ

SEQ ID NO: 435 - DNA, 756 bp, synthetic construct
  misc_feature 1..756: note = Variant of Ketone Reductase from L. kefir
  source 1..756: mol_type = other DNA
atgaccgatcgtctgaagggcaaagtagccatcgtaaccggcgggactctgggtatcggtaaagcaatcgccgataaatttgtagaggagggtgcgaaagtagttattactggtcgtcacgcggatgtaggtgaaaaggccgccaaatcaatcggcggcactgatgttattcgctttgtccagcacgatgcatccgatgaagcaggctggacgaagctgttcgacaccaccgaggaggcattcggcccggttacgaccgtcgtgaacaatgcagggattgcagtttccaaaagcgttgaagacactgacacggaggaatggcgtaaactgctgtccgttaatctggatggtgtttttttcggcacccgtctgggcattcagcgcatgaaaaataaaggcttgggcgctagcatcatcaatatgagcagtattgctgggattgtaggcgatccgacgctgggggcatacaacgcttccaagggggcggtacgtatcatgtcgaaaagcgcagcgctggattgcgcactgaaggactacgatgtgcgtgtcaacacagtacatccgggcgaaatcaagaccccgctggtcgatgatctggaaggtgctgaggaaatgatgtcacagcgtacgaaaacccctatgggccacattggcgaaccgaatgacatcgcatggatctgtgtgtacctggcatctgacgaatcgaaatttgcgacgggtgcagaatttgtggtcgacggcgggtataccgcacag

SEQ ID NO: 436 - protein, 252 aa, synthetic construct
  REGION 1..252: note = Variant of Ketone Reductase from L. kefir
MTDRLKGKVAIVTGGTLGIGKAIADKFVEEGAKVVITGRHADVGEKAAKSIGGTDVIRFVQHDASDEAGWTKLFDTTEEAFGPVTTVVNNAGIAVSKSVEDTDTEEWRKLLSVNLDGVFFGTRLGIQRMKNKGLGASIINMSSIAGIVGDPTLGAYNASKGAVRIMSKSAALDCALKDYDVRVNTVHPGEIKTPLVDDLEGAEEMMSQRTKTPMGHIGEPNDIAWICVYLASDESKFATGAEFVVDGGYTAQ

SEQ ID NO: 437 - DNA, 756 bp, synthetic construct
  misc_feature 1..756: note = Variant of Ketone Reductase from L. kefir
  source 1..756: mol_type = other DNA
atgaccgatcgtctgaagggcaaagtagccatcgtaaccggcgggactctgggtatcggtaaagcaatcgccgataaatttgtagaggagggtgcgaaagtagttattactggtcgtcacgcggatgtaggtgaaaaggccgccaaatcaatcggcggcactgatgttattcgctttgtccagcacgatgcacgcgatgaagcaggctggacgaagctgttcgacaccaccgaggaggcattcggcccggttacgaccgtcgtgaacaatgcagggattgcagtttccaaaagcgttgaagacactgacacggaggaatggcgtaaactgctgtccgttaatctggatggtgtttttttcggcacccgtctgggcattcagcgcatgaaaaataaaggcttgggcgctagcatcatcaatatgagcagtattgctgggctggtaggcgatccgaagctgggggcatacaacgcttccaagggggcggtacgtatcatgtcgaaaagcgcagcgctggattgcgcactgaaggactacgatgtgcgtgtcaacacagtacatccgggcgaaatcaagaccccgctggtcgatgatctggaaggtgctgaggaaatgatgtcacagcgtacgaaaacccctatgggccacattggcgaaccgaatgacatcgcatggatctgtgtgtacctggcatctgacgaatcgaaatttgcgacgggtgcagaatttgtggtcgacggcgggtataccgcacag

SEQ ID NO: 438 - protein, 252 aa, synthetic construct
  REGION 1..252: note = Variant of Ketone Reductase from L. kefir
MTDRLKGKVAIVTGGTLGIGKAIADKFVEEGAKVVITGRHADVGEKAAKSIGGTDVIRFVQHDARDEAGWTKLFDTTEEAFGPVTTVVNNAGIAVSKSVEDTDTEEWRKLLSVNLDGVFFGTRLGIQRMKNKGLGASIINMSSIAGLVGDPKLGAYNASKGAVRIMSKSAALDCALKDYDVRVNTVHPGEIKTPLVDDLEGAEEMMSQRTKTPMGHIGEPNDIAWICVYLASDESKFATGAEFVVDGGYTAQ

SEQ ID NO: 439 - DNA, 756 bp, synthetic construct
  misc_feature 1..756: note = Variant of Ketone Reductase from L. kefir
  source 1..756: mol_type = other DNA
atgaccgatcgtctgaagggcaaagtagccatcgtaaccggcgggactctgggtatcggtaaagcaatcgccgataaatttgtagaggagggtgcgaaagtagttattactggtcgtcacgcggatgtaggtgaaaaggccgccaaatcaatcggcggcactgatgttattcgctttgtccagcacgatgcacgcgatgaagcaggctggacgaagctgttcgacaccaccgaggaggcattcggcccggttacgaccgtcgtgaacaatgcagggattgcagtttccaaaagcgttgaagacactaccacggaggaatggcgtaaactgctgtccgttaatctggatggtgtttttttcggcacccgtctgggcattcagcgcatgaaaaataaaggcttgggcgctagcatcatcaatatgagcagtattgctgggattgtaggcgatccgaagctgggggcatacaacgcttccaagggggcggtacgtatcatgtcgaaaagcgcagcgctggattgcgcactgaaggactacgatgtgcgtgtcaacacagtacatccgggcgaaatcaagaccccgctggtcgatgatctggaaggtgctgaggaaatgatgtcacagcgtacgaaaacccctatgggccacattggcgaaccgaatgacatcgcatggatctgtgtgtacctggcatctgacgaatcgaaatttgcgacgggtgcagaatttgtggtcgacggcgggtataccgcacag

SEQ ID NO: 440 - protein, 252 aa, synthetic construct
  REGION 1..252: note = Variant of Ketone Reductase from L. kefir
MTDRLKGKVAIVTGGTLGIGKAIADKFVEEGAKVVITGRHADVGEKAAKSIGGTDVIRFVQHDARDEAGWTKLFDTTEEAFGPVTTVVNNAGIAVSKSVEDTTTEEWRKLLSVNLDGVFFGTRLGIQRMKNKGLGASIINMSSIAGIVGDPKLGAYNASKGAVRIMSKSAALDCALKDYDVRVNTVHPGEIKTPLVDDLEGAEEMMSQRTKTPMGHIGEPNDIAWICVYLASDESKFATGAEFVVDGGYTAQ

SEQ ID NO: 441 - DNA, 756 bp, synthetic construct
  misc_feature 1..756: note = Variant of Ketone Reductase from L. kefir
  source 1..756: mol_type = other DNA
atgaccgatcgtctgaagggcaaagtagccatcgtaaccggcgggactctgggtatcggtaaagcaatcgccgataaatttgtagaggagggtgcgaaagtagttattactggtcgtcacgcggatgtaggtgaaaaggccgccaaatcaatcggcggcactgatgttattcgctttgtccagcacgatgcaagcgatgaagcaggctggacgacgctgttcgacaccaccgaggaggcattcggcccggttacgaccgtcgtgaacaatgcagggattgcagtttccaaaagcgttgaagacactacgacggaggaatggcgtaaactgctgtccgttaatctggatggtgtttttttcggcacccgtctgggcattcagcgcatgaaatataaaggcttgggcgctagcatcatcaatatgagcagtattgctgggctggtaggcgatccgacgctgggggcatacaacgcttccaagggggcggtacgtatcatgtcgaaaagcgcagcgctggattgcgcactgaaggactacgatattcgtgtcaacacagtacatccgggcgaaatcaagaccccactggtccgtgatctggaaggtgctgaggaaatgatgtcacagcgtacgaaaacccctatgggccacattggcgaaccgaatgacatcgcatggatctgtgtgtacctggcatctgacgaatcgaaatttgcgacgggtgcagaatttgtggtcgacggcgggtataccgcacag

SEQ ID NO: 442 - protein, 252 aa, synthetic construct
  REGION 1..252: note = Variant of Ketone Reductase from L. kefir
MTDRLKGKVAIVTGGTLGIGKAIADKFVEEGAKVVITGRHADVGEKAAKSIGGTDVIRFVQHDASDEAGWTTLFDTTEEAFGPVTTVVNNAGIAVSKSVEDTTTEEWRKLLSVNLDGVFFGTRLGIQRMKYKGLGASIINMSSIAGLVGDPTLGAYNASKGAVRIMSKSAALDCALKDYDIRVNTVHPGEIKTPLVRDLEGAEEMMSQRTKTPMGHIGEPNDIAWICVYLASDESKFATGAEFVVDGGYTAQ

SEQ ID NO: 443 - DNA, 756 bp, synthetic construct
  misc_feature 1..756: note = Variant of Ketone Reductase from L. kefir
  source 1..756: mol_type = other DNA
atgaccgatcgtctgaagggcaaagtagccatcgtaaccggcgggactctgggtatcggtaaagcaatcgccgataaatttgtagaggagggtgcgaaagtagttattactggtcgtcacgcggatgtaggtgaaaaggccgccaaatcaatcggcggcactgatgttattcgctttgtccagcacgatgcaagcgatgaagcaggctggacgaagctgttcgacaccaccgaggaggcattcggcccggttacgaccgtcgtgaacaatgcagggattgcagtttccaaaagcgttgaagacactaccacggaggaatggcgtaaactgctgtccgttaatctggatggtgtttttttcggcacccgtctgggcattcagcgcatgaaaaataaaggcttgggcgctagcatcatcaatatgagcagtattgctgggctggtaggcgatccgacgctgggggcatacaacgcttccaagggggcggtacgtatcatgtcgaaaagcgcagcgctggattgcgcactgaaggactacgatgtgcgtgtcaacacagtacatccgggcgaaatcaagaccccgctggtcgatgatctggaaggtgctgaggaaatgatgtcacagcgtacgaaaacccctatgggccacattggcgaaccgaatgacatcgcatggatctgtgtgtacctggcatctgacgaatcgaaatttgcgacgggtgcagaatttgtggtcgacggcgggtataccgcacag

SEQ ID NO: 444 - protein, 252 aa, synthetic construct
  REGION 1..252: note = Variant of Ketone Reductase from L. kefir
MTDRLKGKVAIVTGGTLGIGKAIADKFVEEGAKVVITGRHADVGEKAAKSIGGTDVIRFVQHDASDEAGWTKLFDTTEEAFGPVTTVVNNAGIAVSKSVEDTTTEEWRKLLSVNLDGVFFGTRLGIQRMKNKGLGASIINMSSIAGLVGDPTLGAYNASKGAVRIMSKSAALDCALKDYDVRVNTVHPGEIKTPLVDDLEGAEEMMSQRTKTPMGHIGEPNDIAWICVYLASDESKFATGAEFVVDGGYTAQ

SEQ ID NO: 445 - DNA, 756 bp, synthetic construct
  misc_feature 1..756: note = Variant of Ketone Reductase from L. kefir
  source 1..756: mol_type = other DNA
atgaccgatcgtctgaagggcaaagtagccatcgtaaccggcgggactctgggtatcggtaaagcaatcgccgataaatttgtagaggagggtgcgaaagtagttattactggtcgtcacgcggatgtaggtgaaaaggccgccaaatcaatcggcggcactgatgttattcgctttgtccagcacgatgcaagcgatgaagcaggctggacgacggtgttcgacaccaccgaggaggcattcggcccggttacgaccgtcgtgaacaatgcagggattgcagtttccaaaagcgttgaagacactgacacggaggaatggcgtaaactgctgtccgttaatctggatggtgtttttttcggcacccgtctgggcattcagcgcatgaaaaataaaggcttgggcgctagcatcatcaatatgagcagtattgctgggctggtaggcgatccgacgctgggggcatacaacgcttccaagggggcggtacgtatcatgtcgaaaagcgcagcgctggattgcgcactgaaggactacgatgttcgtgtcaacacagtacatccgggcgaaatcaagaccccactggtcgatgatctggaaggtgctgaggaaatgatgtcacagcgtacgaaaacccctatgggccacattggcgaaccgaatgacatcgcatggatctgtgtgtacctggcatctgacgaatcgaaatttgcgacgggtgcagaatttgtggtcgacggcgggtataccgcacag

SEQ ID NO: 446 - protein, 252 aa, synthetic construct
  REGION 1..252: note = Variant of Ketone Reductase from L. kefir
MTDRLKGKVAIVTGGTLGIGKAIADKFVEEGAKVVITGRHADVGEKAAKSIGGTDVIRFVQHDASDEAGWTTVFDTTEEAFGPVTTVVNNAGIAVSKSVEDTDTEEWRKLLSVNLDGVFFGTRLGIQRMKNKGLGASIINMSSIAGLVGDPTLGAYNASKGAVRIMSKSAALDCALKDYDVRVNTVHPGEIKTPLVDDLEGAEEMMSQRTKTPMGHIGEPNDIAWICVYLASDESKFATGAEFVVDGGYTAQ

SEQ ID NO: 447 - DNA, 756 bp, synthetic construct
  misc_feature 1..756: note = Variant of Ketone Reductase from L. kefir
  source 1..756: mol_type = other DNA
atgaccgatcgtctgaagggcaaagtagccatcgtaaccggcgggactctgggtatcggtaaagcaatcgccgataaatttgtagaggagggtgcgaaagtagttattactggtcgtcacgcggatgtaggtgaaaaggccgccaaatcaatcggcggcactgatgttattcgctttgtccagcacgatgcatccgatgaagcaggctggacgacgctgttcgacaccaccgaggaggcattcggcccggttacgaccgtcgtgaacaatgcagggattgcagtttccaaaagcgttgaagacactacgacggaggaatggcgtaaactgctgtccgttaatctggatggtgtttttttcggcacccgtctgggcattcagcgcatgaaaaataaaggcttgggcgctagcatcatcaatatgagcagtattgctgggctggtaggcgatccgaagctgggggcatacaacgcttccaagggggcggtacgtatcatgtcgaaaagcgcagcgctggattgcgcactgaaggactacgatattcgtgtcaacacagtacatccgggcgaaatcaagaccccactggtcgatgatctggaaggtgctgaggaaatgatgtcacagcgtacgaaaacccctatgggccacattggcgaaccgaatgacatcgcatggatctgtgtgtacctggcatctgacgaatcgaaatttgcgacgggtgcagaatttgtggtcgacggcgggtataccgcacag

SEQ ID NO: 448 - protein, 252 aa, synthetic construct
  REGION 1..252: note = Variant of Ketone Reductase from L. kefir
MTDRLKGKVAIVTGGTLGIGKAIADKFVEEGAKVVITGRHADVGEKAAKSIGGTDVIRFVQHDASDEAGWTTLFDTTEEAFGPVTTVVNNAGIAVSKSVEDTTTEEWRKLLSVNLDGVFFGTRLGIQRMKNKGLGASIINMSSIAGLVGDPKLGAYNASKGAVRIMSKSAALDCALKDYDIRVNTVHPGEIKTPLVDDLEGAEEMMSQRTKTPMGHIGEPNDIAWICVYLASDESKFATGAEFVVDGGYTAQ

SEQ ID NO: 449 - DNA, 756 bp, synthetic construct
  misc_feature 1..756: note = Variant of Ketone Reductase from L. kefir
  source 1..756: mol_type = other DNA
atgaccgatcgtctgaagggcaaagtagccatcgtaaccggcgggactctgggtatcggtaaagcaatcgccgataaatttgtagaggagggtgcgaaagtagttattactggtcgtcacgcggatgtaggtgaaaaggccgccaaatcaatcggcggcactgatgttattcgctttgtccagcacgatgcatccgatgaagcaggctggacgaaggtgttcgacaccaccgaggaggcattcggcccggttacgaccgtcgtgaacaatgcagggattgcagtttccaaaagcgttgaagacactacgacggaggaatggcgtaaactgctgtccgttaatctggatggtgtttttttcggcacccgtctgggcattcagcgcatgaaaaataaaggcttgggcgctagcatcatcaatatgagcagtattgctgggctcgtaggcgatccgacgctgggggcatacaacgcttccaagggggcggtacgtatcatgtcgaaaagcgcagcgctggattgcgcactgaaggactacgatattcgtgtcaacacagtacatccgggcgaaatcaagaccccgctggtcgatgatctggaaggtgctgaggaaatgatgtcacagcgtacgaaaacccctatgggccacattggcgaaccgaatgacatcgcatggatctgtgtgtacctggcatctgacgaatcgaaatttgcgacgggtgcagaatttgtggtcgacggcgggtataccgcacag

SEQ ID NO: 450 - protein, 252 aa, synthetic construct
  REGION 1..252: note = Variant of Ketone Reductase from L. kefir
MTDRLKGKVAIVTGGTLGIGKAIADKFVEEGAKVVITGRHADVGEKAAKSIGGTDVIRFVQHDASDEAGWTKVFDTTEEAFGPVTTVVNNAGIAVSKSVEDTTTEEWRKLLSVNLDGVFFGTRLGIQRMKNKGLGASIINMSSIAGLVGDPTLGAYNASKGAVRIMSKSAALDCALKDYDIRVNTVHPGEIKTPLVDDLEGAEEMMSQRTKTPMGHIGEPNDIAWICVYLASDESKFATGAEFVVDGGYTAQ

SEQ ID NO: 451 - DNA, 756 bp, synthetic construct
  misc_feature 1..756: note = Variant of Ketone Reductase from L. kefir
  source 1..756: mol_type = other DNA
atgaccgatcgtctgaagggcaaagtagccatcgtaaccggcgggactctgggtatcggtaaagcaatcgccgataaatttgtagaggagggtgcgaaagtagttattactggtcgtcacgcggatgtaggtgaaaaggccgccaaatcaatcggcggcactgatgttattcgctttgtccagcacgatgcacgcgatgaagcaggctggacgacggtgttcgacaccaccgaggaggcattcggcccggttacgaccgtcgtgaacaatgcagggattgcagtttccaaaagcgttgaagacactgacacggaggaatggcgtaaactgctgtccgttaatctggatggtgtttttttcggcacccgtctgggcattcagcgcatgaaaaataaaggcttgggcgctagcatcatcaatatgagcagtattgctgggctcgtaggcgatccgacgctgggggcatacaacgcttccaagggggcggtacgtatcatgtcgaaaagcgcagcgctggattgcgcactgaaggactacgatgtgcgtgtcaacacagtacatccgggcgaaatcaagaccccgctggtcgatgatctggaaggtgctgaggaaatgatgtcacagcgtacgaaaacccctatgggccacattggcgaaccgaatgacatcgcatggatctgtgtgtacctggcatctgacgaatcgaaatttgcgacgggtgcagaatttgtggtcgacggcgggtataccgcacag

SEQ ID NO: 452 - protein, 252 aa, synthetic construct
  REGION 1..252: note = Variant of Ketone Reductase from L. kefir
MTDRLKGKVAIVTGGTLGIGKAIADKFVEEGAKVVITGRHADVGEKAAKSIGGTDVIRFVQHDARDEAGWTTVFDTTEEAFGPVTTVVNNAGIAVSKSVEDTDTEEWRKLLSVNLDGVFFGTRLGIQRMKNKGLGASIINMSSIAGLVGDPTLGAYNASKGAVRIMSKSAALDCALKDYDVRVNTVHPGEIKTPLVDDLEGAEEMMSQRTKTPMGHIGEPNDIAWICVYLASDESKFATGAEFVVDGGYTAQ

SEQ ID NO: 453 - DNA, 756 bp, synthetic construct
  misc_feature 1..756: note = Variant of Ketone Reductase from L. kefir
  source 1..756: mol_type = other DNA
atgaccgatcgtctgaagggcaaagtagccatcgtaaccggcgggactctgggtatcggtaaagcaatcgccgataaatttgtagaggagggtgcgaaagtagttattactggtcgtcacgcggatgtaggtgaaaaggccgccaaatcaatcggcggcactgatgttattcgctttgtccagcacgatgcatccgatgaagcaggctggacgaaggtgttcgacaccaccgaggaggcattcggcccggttacgaccgtcgtgaacaatgcagggattgcagtttccaaaagcgttgaagacactgacacggaggaatggcgtaaactgctgtccgttaatctggatggtgtttttttcggcacccgtctgggcattcagcgcatgaaaaataaaggcttgggcgctagcatcatcaatatgagcagtattgctgggctggtaggcgatccgacgctgggggcatacaacgcttccaagggggcggtacgtatcatgtcgaaaagcgcagcgctggattgcgcactgaaggactacgatgtgcgtgtcaacacagtacatccgggcgaaatcaagaccccgctggtcgatgatctggaaggtgctgaggaaatgatgtcacagcgtacgaaaacccctatgggccacattggcgaaccgaatgacatcgcatggatctgtgtgtacctggcatctgacgaatcgaaatttgcgacgggtgcagaatttgtggtcgacggcgggtataccgcacag

SEQ ID NO: 454 - protein, 252 aa, synthetic construct
  REGION 1..252: note = Variant of Ketone Reductase from L. kefir
MTDRLKGKVAIVTGGTLGIGKAIADKFVEEGAKVVITGRHADVGEKAAKSIGGTDVIRFVQHDASDEAGWTKVFDTTEEAFGPVTTVVNNAGIAVSKSVEDTDTEEWRKLLSVNLDGVFFGTRLGIQRMKNKGLGASIINMSSIAGLVGDPTLGAYNASKGAVRIMSKSAALDCALKDYDVRVNTVHPGEIKTPLVDDLEGAEEMMSQRTKTPMGHIGEPNDIAWICVYLASDESKFATGAEFVVDGGYTAQ

SEQ ID NO: 455 - DNA, 756 bp, synthetic construct
  misc_feature 1..756: note = Variant of Ketone Reductase from L. kefir
  source 1..756: mol_type = other DNA
atgaccgatcgtctgaagggcaaagtagccatcgtaaccggcgggactctgggtatcggtaaagcaatcgccgataaatttgtagaggagggtgcgaaagtagttattactggtcgtcacgcggatgtaggtgaaaaggccgccaaatcaatcggcggcactgatgttattcgctttgtccagcacgatgcaagcgatgaagcaggctggacgaagctgttcgacaccaccgaggaggcattcggcccggttacgaccgtcgtgaacaatgcagggattgcagtttccaaaagcgttgaagacactgacacggaggaatggcgtaaactgctgtccgttaatctggatggtgtttttttcggcacccgtctgggcattcagcgcatgaaaaataaaggcttgggcgctagcatcatcaatatgagcagtattgctgggattgtaggcgatccgaagctgggggcatacaacgcttccaagggggcggtacgtatcatgtcgaaaagcgcagcgctggattgcgcactgaaggactacgatgttcgtgtcaacacagtacatccgggcgaaatcaagaccccactggtcgatgatctggaaggtgctgaggaaatgatgtcacagcgtacgaaaacccctatgggccacattggcgaaccgaatgacatcgcatggatctgtgtgtacctggcatctgacgaatcgaaatttgcgacgggtgcagaatttgtggtcgacggcgggtataccgcacag

SEQ ID NO: 456 - protein, 252 aa, synthetic construct
  REGION 1..252: note = Variant of Ketone Reductase from L. kefir
MTDRLKGKVAIVTGGTLGIGKAIADKFVEEGAKVVITGRHADVGEKAAKSIGGTDVIRFVQHDASDEAGWTKLFDTTEEAFGPVTTVVNNAGIAVSKSVEDTDTEEWRKLLSVNLDGVFFGTRLGIQRMKNKGLGASIINMSSIAGIVGDPKLGAYNASKGAVRIMSKSAALDCALKDYDVRVNTVHPGEIKTPLVDDLEGAEEMMSQRTKTPMGHIGEPNDIAWICVYLASDESKFATGAEFVVDGGYTAQ

SEQ ID NO: 457 - DNA, 756 bp, synthetic construct
  misc_feature 1..756: note = Variant of Ketone Reductase from L. kefir
  source 1..756: mol_type = other DNA
atgaccgatcgtctgaagggcaaagtagccatcgtaaccggcgggactctgggtatcggtaaagcaatcgccgataaatttgtagaggagggtgcgaaagtagttattactggtcgtcacgcggatgtaggtgaaaaggccgccaaatcaatcggcggcactgatgttattcgctttgtccagcacgatgcaagcgatgaagcaggctggacgacgctgttcgacaccaccgaggaggcattcggcccggttacgaccgtcgtgaacaatgcagggattgcagtttccaaaagcgttgaagacactgacacggaggaatggcgtaaactgctgtccgttaatctggatggtgtttttttcggcacccgtctgggcattcagcgcatgaaaaataaaggcttgggcgctagcatcatcaatatgagcagtattgctgggctggtaggcgatccgacgctgggggcatacaacgcttccaagggggcggtacgtatcatgtcgaaaagcgcagcgctggattgcgcactgaaggactacgatgttcgtgtcaacacagtacatccgggcgaaatcaagaccccactggtcgatgatctggaaggtgctgaggaaatgatgtcacagcgtacgaaaacccctatgggccacattggcgaaccgaatgacatcgcatggatctgtgtgtacctggcatctgacgaatcgaaatttgcgacgggtgcagaatttgtggtcgacggcgggtataccgcacag

SEQ ID NO: 458 - protein, 252 aa, synthetic construct
  REGION 1..252: note = Variant of Ketone Reductase from L. kefir
MTDRLKGKVAIVTGGTLGIGKAIADKFVEEGAKVVITGRHADVGEKAAKSIGGTDVIRFVQHDASDEAGWTTLFDTTEEAFGPVTTVVNNAGIAVSKSVEDTDTEEWRKLLSVNLDGVFFGTRLGIQRMKNKGLGASIINMSSIAGLVGDPTLGAYNASKGAVRIMSKSAALDCALKDYDVRVNTVHPGEIKTPLVDDLEGAEEMMSQRTKTPMGHIGEPNDIAWICVYLASDESKFATGAEFVVDGGYTAQ

SEQ ID NO: 459 - DNA, 756 bp, synthetic construct
  misc_feature 1..756: note = Variant of Ketone Reductase from L. kefir
  source 1..756: mol_type = other DNA
atgaccgatcgtctgaagggcaaagtagccatcgtaaccggcgggactctgggtatcggtaaagcaatcgccgataaatttgtagaggagggtgcgaaagtagttattactggtcgtcacgcggatgtaggtgaaaaggccgccaaatcaatcggcggcactgatgttattcgctttgtccagcacgatgcaagcgatgaagcaggctggacgaaggtgttcgacaccaccgaggaggcattcggcccggttacgaccgtcgtgaacaatgcagggattgcagtttccaaaagcgttgaagacactacgacggaggaatggcgtaaactgctgtccgttaatctggatggtgtttttttcggcacccgtctgggcattcagcgcatgaaatataaaggcttgggcgctagcatcatcaatatgagcagtattgctgggattgtaggcgatccgacgctgggggcatacaacgcttccaagggggcggtacgtatcatgtcgaaaagcgcagcgctggattgcgcactgaaggactacgatgtgcgtgtcaacacagtacatccgggcgaaatcaagaccccgctggtcgatgatctggaaggtgctgaggaaatgatgtcacagcgtacgaaaacccctatgggccacattggcgaaccgaatgacatcgcatggatctgtgtgtacctggcatctgacgaatcgaaatttgcgacgggtgcagaatttgtggtcgacggcgggtataccgcacag

SEQ ID NO: 460 - protein, 252 aa, synthetic construct
  REGION 1..252: note = Variant of Ketone Reductase from L. kefir
MTDRLKGKVAIVTGGTLGIGKAIADKFVEEGAKVVITGRHADVGEKAAKSIGGTDVIRFVQHDASDEAGWTKVFDTTEEAFGPVTTVVNNAGIAVSKSVEDTTTEEWRKLLSVNLDGVFFGTRLGIQRMKYKGLGASIINMSSIAGIVGDPTLGAYNASKGAVRIMSKSAALDCALKDYDVRVNTVHPGEIKTPLVDDLEGAEEMMSQRTKTPMGHIGEPNDIAWICVYLASDESKFATGAEFVVDGGYTAQ

SEQ ID NO: 461 - DNA, 756 bp, synthetic construct
  misc_feature 1..756: note = Variant of Ketone Reductase from L. kefir
  source 1..756: mol_type = other DNA
atgaccgatcgtctgaagggcaaagtagccatcgtaaccggcgggactctgggtatcggtaaagcaatcgccgataaatttgtagaggagggtgcgaaagtagttattactggtcgtcacgcggatgtaggtgaaaaggccgccaaatcaatcggcggcactgatgttattcgctttgtccagcacgatgcaagcgatgaagcaggctggacgaaggtgttcgacaccaccgaggaggcattcggcccggttacgaccgtcgtgaacaatgcagggattgcagtttccaaaagcgttgaagacactaccacggaggaatggcgtaaactgctgtccgttaatctggatggtgtttttttcggcacccgtctgggcattcagcgcatgaaaaataaaggcttgggcgctagcatcatcaatatgagcagtattgctgggattgtaggcgatccgacgctgggggcatacaacgcttccaagggggcggtacgtatcatgtcgaaaagcgcagcgctggattgcgcactgaaggactacgatgttcgtgtcaacacagtacatccgggcgaaatcaagaccccgctggtcgatgatctggaaggtgctgaggaaatgatgtcacagcgtacgaaaacccctatgggccacattggcgaaccgaatgacatcgcatggatctgtgtgtacctggcatctgacgaatcgaaatttgcgacgggtgcagaatttgtggtcgacggcgggtataccgcacag

SEQ ID NO: 462 - protein, 252 aa, synthetic construct
  REGION 1..252: note = Variant of Ketone Reductase from L. kefir
MTDRLKGKVAIVTGGTLGIGKAIADKFVEEGAKVVITGRHADVGEKAAKSIGGTDVIRFVQHDASDEAGWTKVFDTTEEAFGPVTTVVNNAGIAVSKSVEDTTTEEWRKLLSVNLDGVFFGTRLGIQRMKNKGLGASIINMSSIAGIVGDPTLGAYNASKGAVRIMSKSAALDCALKDYDVRVNTVHPGEIKTPLVDDLEGAEEMMSQRTKTPMGHIGEPNDIAWICVYLASDESKFATGAEFVVDGGYTAQ

SEQ ID NO: 463 - DNA, 756 bp, synthetic construct
  misc_feature 1..756: note = Variant of Ketone Reductase from L. kefir
  source 1..756: mol_type = other DNA
atgaccgatcgtctgaagggcaaagtagccatcgtaaccggcgggactctgggtatcggtaaagcaatcgccgataaatttgtagaggagggtgcgaaagtagttattactggtcgtcacgcggatgtaggtgaaaaggccgccaaatcaatcggcggcactgatgttattcgctttgtccagcacgatgcacgcgatgaagcaggctggacgaagctgttcgacaccaccgaggaggcattcggcccggttacgaccgtcgtgaacaatgcagggattgcagtttccaaaagcgttgaagacactacgacggaggaatggcgtaaactgctgtccgttaatctggatggtgtttttttcggcacccgtctgggcattcagcgcatgaaatataaaggcttgggcgctagcatcatcaatatgagcagtattgctgggctggtaggcgatccgaagctgggggcatacaacgcttccaagggggcggtacgtatcatgtcgaaaagcgcagcgctggattgcgcactgaaggactacgatgttcgtgtcaacacagtacatccgggcgaaatcaagaccccactggtcgatgatctggaaggtgctgaggaaatgatgtcacagcgtacgaaaacccctatgggccacattggcgaaccgaatgacatcgcatggatctgtgtgtacctggcatctgacgaatcgaaatttgcgacgggtgcagaatttgtggtcgacggcgggtataccgcacag

SEQ ID NO: 464 - protein, 252 aa, synthetic construct
  REGION 1..252: note = Variant of Ketone Reductase from L. kefir
MTDRLKGKVAIVTGGTLGIGKAIADKFVEEGAKVVITGRHADVGEKAAKSIGGTDVIRFVQHDARDEAGWTKLFDTTEEAFGPVTTVVNNAGIAVSKSVEDTTTEEWRKLLSVNLDGVFFGTRLGIQRMKYKGLGASIINMSSIAGLVGDPKLGAYNASKGAVRIMSKSAALDCALKDYDVRVNTVHPGEIKTPLVDDLEGAEEMMSQRTKTPMGHIGEPNDIAWICVYLASDESKFATGAEFVVDGGYTAQ

SEQ ID NO: 465 - DNA, 756 bp, synthetic construct
  misc_feature 1..756: note = Variant of Ketone Reductase from L. kefir
  source 1..756: mol_type = other DNA
atgaccgatcgtctgaagggcaaagtagccatcgtaaccggcgggactctgggtatcggtaaagcaatcgccgataaatttgtagaggagggtgcgaaagtagttattactggtcgtcacgcggatgtaggtgaaaaggccgccaaatcaatcggcggcactgatgttattcgctttgtccagcacgatgcacgcgatgaagcaggctggacgaagctgttcgacaccaccgaggaggcattcggcccggttacgaccgtcgtgaacaatgcagggattgcagtttccaaaagcgttgaagacactacgacggaggaatggcgtaaactgctgtccgttaatctggatggtgtttttttcggcacccgtctgggcattcagcgcatgaaaaataaaggcttgggcgctagcatcatcaatatgagcagtattgctgggctggtaggcgatccgaagctgggggcatacaacgcttccaagggggcggtacgtatcatgtcgaaaagcgcagcgctggattgcgcactgaaggactacgatgttcgtgtcaacacagtacatccgggcgaaatcaagaccccactggtcgatgatctggaaggtgctgaggaaatgatgtcacagcgtacgaaaacccctatgggccacattggcgaaccgaatgacatcgcatggatctgtgtgtacctggcatctgacgaatcgaaatttgcgacgggtgcagaatttgtggtcgacggcgggtataccgcacag

SEQ ID NO: 466 - protein, 252 aa, synthetic construct
  REGION 1..252: note = Variant of Ketone Reductase from L. kefir
MTDRLKGKVAIVTGGTLGIGKAIADKFVEEGAKVVITGRHADVGEKAAKSIGGTDVIRFVQHDARDEAGWTKLFDTTEEAFGPVTTVVNNAGIAVSKSVEDTTTEEWRKLLSVNLDGVFFGTRLGIQRMKNKGLGASIINMSSIAGLVGDPKLGAYNASKGAVRIMSKSAALDCALKDYDVRVNTVHPGEIKTPLVDDLEGAEEMMSQRTKTPMGHIGEPNDIAWICVYLASDESKFATGAEFVVDGGYTAQ

SEQ ID NO: 467 - DNA, 756 bp, synthetic construct
  misc_feature 1..756: note = Variant of Ketone Reductase from L. kefir
  source 1..756: mol_type = other DNA
atgaccgatcgtctgaagggcaaagtagccatcgtaaccggcgggactctgggtatcggtaaagcaatcgccgataaatttgtagaggagggtgcgaaagtagttattactggtcgtcacgcggatgtaggtgaaaaggccgccaaatcaatcggcggcactgatgttattcgctttgtccagcacgatgcacgcgatgaagcaggctggacgacgctgttcgacaccaccgaggaggcattcggcccggttacgaccgtcgtgaacaatgcagggattgcagtttccaaaagcgttgaagacactaccacggaggaatggcgtaaactgctgtccgttaatctggatggtgtttttttcggcacccgtctgggcattcagcgcatgaaaaataaaggcttgggcgctagcatcatcaatatgagcagtattgctgggattgtaggcgatccgacgctgggggcatacaacgcttccaagggggcggtacgtatcatgtcgaaaagcgcagcgctggattgcgcactgaaggactacgatgtgcgtgtcaacacagtacatccgggcgaaatcaagaccccgctggtcgatgatctggaaggtgctgaggaaatgatgtcacagcgtacgaaaacccctatgggccacattggcgaaccgaatgacatcgcatggatctgtgtgtacctggcatctgacgaatcgaaatttgcgacgggtgcagaatttgtggtcgacggcgggtataccgcacag

SEQ ID NO: 468 - protein, 252 aa, synthetic construct
  REGION 1..252: note = Variant of Ketone Reductase from L. kefir
MTDRLKGKVAIVTGGTLGIGKAIADKFVEEGAKVVITGRHADVGEKAAKSIGGTDVIRFVQHDARDEAGWTTLFDTTEEAFGPVTTVVNNAGIAVSKSVEDTTTEEWRKLLSVNLDGVFFGTRLGIQRMKNKGLGASIINMSSIAGIVGDPTLGAYNASKGAVRIMSKSAALDCALKDYDVRVNTVHPGEIKTPLVDDLEGAEEMMSQRTKTPMGHIGEPNDIAWICVYLASDESKFATGAEFVVDGGYTAQ

SEQ ID NO: 469 - DNA, 756 bp, synthetic construct
  misc_feature 1..756: note = Variant of Ketone Reductase from L. kefir
  source 1..756: mol_type = other DNA
atgaccgatcgtctgaagggcaaagtagccatcgtaaccggcgggactctgggtatcggtaaagcaatcgccgataaatttgtagaggagggtgcgaaagtagttattactggtcgtcacgcggatgtaggtgaaaaggccgccaaatcaatcggcggcactgatgttattcgctttgtccagcacgatgcaagcgatgaagcaggctggacgaagctgttcgacaccaccgaggaggcattcggcccggttacgaccgtcgtgaacaatgcagggattgcagtttccaaaagcgttgaagacactgacacggaggaatggcgtaaactgctgtccgttaatctggatggtgtttttttcggcacccgtctgggcattcagcgcatgaaaaataaaggcttgggcgctagcatcatcaatatgagcagtattgctgggctggtaggcgatccgacgctgggggcatacaacgcttccaagggggcggtacgtatcatgtcgaaaagcgcagcgctggattgcgcactgaaggactacgatgttcgtgtcaacacagtacatccgggcgaaatcaagaccccgctggtcgatgatctggaaggtgctgaggaaatgatgtcacagcgtacgaaaacccctatgggccacattggcgaaccgaatgacatcgcatggatctgtgtgtacctggcatctgacgaatcgaaatttgcgacgggtgcagaatttgtggtcgacggcgggtataccgcacag

SEQ ID NO: 470 - protein, 252 aa, synthetic construct
  REGION 1..252: note = Variant of Ketone Reductase from L. kefir
MTDRLKGKVAIVTGGTLGIGKAIADKFVEEGAKVVITGRHADVGEKAAKSIGGTDVIRFVQHDASDEAGWTKLFDTTEEAFGPVTTVVNNAGIAVSKSVEDTDTEEWRKLLSVNLDGVFFGTRLGIQRMKNKGLGASIINMSSIAGLVGDPTLGAYNASKGAVRIMSKSAALDCALKDYDVRVNTVHPGEIKTPLVDDLEGAEEMMSQRTKTPMGHIGEPNDIAWICVYLASDESKFATGAEFVVDGGYTAQ

SEQ ID NO: 471 - DNA, 756 bp, synthetic construct
  misc_feature 1..756: note = Variant of Ketone Reductase from L. kefir
  source 1..756: mol_type = other DNA
atgaccgatcgtctgaagggcaaagtagccatcgtaaccggcgggactctgggtatcggtaaagcaatcgccgataaatttgtagaggagggtgcgaaagtagttattactggtcgtcacgcggatgtaggtgaaaaggccgccaaatcaatcggcggcactgatgttattcgctttgtccagcacgatgcacgcgatgaagcaggctggacgacgctgttcgacaccaccgaggaggcattcggcccggttacgaccgtcgtgaacaatgcagggattgcagtttccaaaagcgttgaagacactacgacggaggaatggcgtaaactgctgtccgttaatctggatggtgtttttttcggcacccgtctgggcattcagcgcatgaaatataaaggcttgggcgctagcatcatcaatatgagcagtattgctgggattgtaggcgatccgacgctgggggcatacaacgcttccaagggggcggtacgtatcatgtcgaaaagcgcagcgctggattgcgcactgaaggactacgatattcgtgtcaacacagtacatccgggcgaaatcaagaccccgctggtcgatgatctggaaggtgctgaggaaatgatgtcacagcgtacgaaaacccctatgggccacattggcgaaccgaatgacatcgcatggatctgtgtgtacctggcatctgacgaatcgaaatttgcgacgggtgcagaatttgtggtcgacggcgggtataccgcacag

SEQ ID NO: 472 - protein, 252 aa, synthetic construct
  REGION 1..252: note = Variant of Ketone Reductase from L. kefir
MTDRLKGKVAIVTGGTLGIGKAIADKFVEEGAKVVITGRHADVGEKAAKSIGGTDVIRFVQHDARDEAGWTTLFDTTEEAFGPVTTVVNNAGIAVSKSVEDTTTEEWRKLLSVNLDGVFFGTRLGIQRMKYKGLGASIINMSSIAGIVGDPTLGAYNASKGAVRIMSKSAALDCALKDYDIRVNTVHPGEIKTPLVDDLEGAEEMMSQRTKTPMGHIGEPNDIAWICVYLASDESKFATGAEFVVDGGYTAQ

SEQ ID NO: 473 - DNA, 756 bp, synthetic construct
  misc_feature 1..756: note = Variant of Ketone Reductase from L. kefir
  source 1..756: mol_type = other DNA
atgaccgatcgtctgaagggcaaagtagccatcgtaaccggcgggactctgggtatcggtaaagcaatcgccgataaatttgtagaggagggtgcgaaagtagttattactggtcgtcacgcggatgtaggtgaaaaggccgccaaatcaatcggcggcactgatgttattcgctttgtccagcacgatgcatccgatgaagcaggctggacgaagctgttcgacaccaccgaggaggcattcggcccggttacgaccgtcgtgaacaatgcagggattgcagtttccaaaagcgttgaagacactaccacggaggaatggcgtaaactgctgtccgttaatctggatggtgtttttttcggcacccgtctgggcattcagcgcatgaaaaataaaggcttgggcgctagcatcatcaatatgagcagtattgctgggattgtaggcgatccgacgctgggggcatacaacgcttccaagggggcggtacgtatcatgtcgaaaagcgcagcgctggattgcgcactgaaggactacgatgtgcgtgtcaacacagtacatccgggcgaaatcaagaccccgctggtcgatgatctggaaggtgctgaggaaatgatgtcacagcgtacgaaaacccctatgggccacattggcgaaccgaatgacatcgcatggatctgtgtgtacctggcatctgacgaatcgaaatttgcgacgggtgcagaatttgtggtcgacggcgggtataccgcacag

SEQ ID NO: 474 - protein, 252 aa, synthetic construct
  REGION 1..252: note = Variant of Ketone Reductase from L. kefir
MTDRLKGKVAIVTGGTLGIGKAIADKFVEEGAKVVITGRHADVGEKAAKSIGGTDVIRFVQHDASDEAGWTKLFDTTEEAFGPVTTVVNNAGIAVSKSVEDTTTEEWRKLLSVNLDGVFFGTRLGIQRMKNKGLGASIINMSSIAGIVGDPTLGAYNASKGAVRIMSKSAALDCALKDYDVRVNTVHPGEIKTPLVDDLEGAEEMMSQRTKTPMGHIGEPNDIAWICVYLASDESKFATGAEFVVDGGYTAQ

SEQ ID NO: 475 - DNA, 756 bp, synthetic construct
  misc_feature 1..756: note = Variant of Ketone Reductase from L. kefir
  source 1..756: mol_type = other DNA
atgaccgatcgtctgaagggcaaagtagccatcgtaaccggcgggactctgggtatcggtaaagcaatcgccgataaatttgtagaggagggtgcgaaagtagttattactggtcgtcacgcggatgtaggtgaaaaggccgccaaatcaatcggcggcactgatgttattcgctttgtccagcacgatgcaagcgatgaagcaggctggacgacgctgttcgacaccaccgaggaggcattcggcccggttacgaccgtcgtgaacaatgcagggattgcagtttccaaaagcgttgaagacactgacacggaggaatggcgtaaactgctgtccgttaatctggatggtgtttttttcggcacccgtctgggcattcagcgcatgaaaaataaaggcttgggcgctagcatcatcaatatgagcagtattgctgggattgtaggcgatccgaagctgggggcatacaacgcttccaagggggcggtacgtatcatgtcgaaaagcgcagcgctggattgcgcactgaaggactacgatattcgtgtcaacacagtacatccgggcgaaatcaagaccccactggtcgatgatctggaaggtgctgaggaaatgatgtcacagcgtacgaaaacccctatgggccacattggcgaaccgaatgacatcgcatggatctgtgtgtacctggcatctgacgaatcgaaatttgcgacgggtgcagaatttgtggtcgacggcgggtataccgcacag

SEQ ID NO: 476 - protein, 252 aa, synthetic construct
  REGION 1..252: note = Variant of Ketone Reductase from L. kefir
MTDRLKGKVAIVTGGTLGIGKAIADKFVEEGAKVVITGRHADVGEKAAKSIGGTDVIRFVQHDASDEAGWTTLFDTTEEAFGPVTTVVNNAGIAVSKSVEDTDTEEWRKLLSVNLDGVFFGTRLGIQRMKNKGLGASIINMSSIAGIVGDPKLGAYNASKGAVRIMSKSAALDCALKDYDIRVNTVHPGEIKTPLVDDLEGAEEMMSQRTKTPMGHIGEPNDIAWICVYLASDESKFATGAEFVVDGGYTAQ

SEQ ID NO: 477 - DNA, 756 bp, synthetic construct
  misc_feature 1..756: note = Variant of Ketone Reductase from L. kefir
  source 1..756: mol_type = other DNA
atgaccgatcgtctgaagggcaaagtagccatcgtaaccggcgggactctgggtatcggtaaagcaatcgccgataaatttgtagaggagggtgcgaaagtagttattactggtcgtcacgcggatgtaggtgaaaaggccgccaaatcaatcggcggcactgatgttattcgctttgtccagcacgatgcaagcgatgaagcaggctggacgacgctgttcgacaccaccgaggaggcattcggcccggttacgaccgtcgtgaacaatgcagggattgcagtttccaaaagcgttgaagacactgacacggaggaatggcgtaaactgctgtccgttaatctggatggtgtttttttcggcacccgtctgggcattcagcgcatgaaatataaaggcttgggcgctagcatcatcaatatgagcagtattgctgggctggtaggcgatccgaagctgggggcatacaacgcttccaagggggcggtacgtatcatgtcgaaaagcgcagcgctggattgcgcactgaaggactacgatgttcgtgtcaacacagtacatccgggcgaaatcaagaccccgctggtcgatgatctggaaggtgctgaggaaatgatgtcacagcgtacgaaaacccctatgggccacattggcgaaccgaatgacatcgcatggctgtgtgtgtacctggcatctgatgaatcgaaatttgcgacgggtgcagaatttgtggtcgacggcgggtataccgcacag

SEQ ID NO: 478 - protein, 252 aa, synthetic construct
  REGION 1..252: note = Variant of Ketone Reductase from L. kefir
MTDRLKGKVAIVTGGTLGIGKAIADKFVEEGAKVVITGRHADVGEKAAKSIGGTDVIRFVQHDASDEAGWTTLFDTTEEAFGPVTTVVNNAGIAVSKSVEDTDTEEWRKLLSVNLDGVFFGTRLGIQRMKYKGLGASIINMSSIAGLVGDPKLGAYNASKGAVRIMSKSAALDCALKDYDVRVNTVHPGEIKTPLVDDLEGAEEMMSQRTKTPMGHIGEPNDIAWLCVYLASDESKFATGAEFVVDGGYTAQ

SEQ ID NO: 479 - DNA, 756 bp, synthetic construct
  misc_feature 1..756: note = Variant of Ketone Reductase from L. kefir
  source 1..756: mol_type = other DNA
atgagcgatcgtctgaaaggcaaagtagccatcgtaaccggcgggactctgggtatcggtttggcaatcgccgataagtttgtagaggagggtgcgaaagtagttattactggtcgtcacgcggatgtaggtgaaaaggccgccaaatcaatcggcggcactgatgttattcgctttgtccagcacgatgcatccgatgaagcaggctggacggacctgttcgacaccaccgaggaggcattcggcccggttacgaccgtcgtgaacaatgcagggattgcagtttccaaaagcgttgaagacactaccacggaggaatggcgtaaactgctgtccgttaatctggatggtgtttttttcggcacccgtctgggcattcagcgcatgaaaaataaaggcttgggcgctagcatcatcaatatgagcagtattgctgggctcgtaggcgatccgacgctgggggcatacaacgcttccaagggggcggtacgtatcatgtcgaaaagcgcagcgctggattgcgcactgaaggactacgacgtgcgtgtcaacacagtacatccgggcgaaatcaagaccccgctggtcgatgatctggaaggtgctgaggaaatgatgtcacagcgtacgaaaacccctatgggccacattggcgaaccgaacgacatcgcatggatctgtgtgtacctggcatctgacgaatcgaaatttgcgacgggtgcagaatttgtggtcgacggcgggtataccgcacag

SEQ ID NO: 480 - protein, 252 aa, synthetic construct
  REGION 1..252: note = Variant of Ketone Reductase from L. kefir
MSDRLKGKVAIVTGGTLGIGLAIADKFVEEGAKVVITGRHADVGEKAAKSIGGTDVIRFVQHDASDEAGWTDLFDTTEEAFGPVTTVVNNAGIAVSKSVEDTTTEEWRKLLSVNLDGVFFGTRLGIQRMKNKGLGASIINMSSIAGLVGDPTLGAYNASKGAVRIMSKSAALDCALKDYDVRVNTVHPGEIKTPLVDDLEGAEEMMSQRTKTPMGHIGEPNDIAWICVYLASDESKFATGAEFVVDGGYTAQ

SEQ ID NO: 481 - DNA, 756 bp, synthetic construct
  misc_feature 1..756: note = Variant of Ketone Reductase from L. kefir
  source 1..756: mol_type = other DNA
atgagcgatcgtctgaaaggcaaagtagccatcgtaaccggcgggactctgggtatcggtttggcaatcgccgataagtttgtagaggagggtgcgaaagtagttattactggtcgtcacgcggatgtaggtgaaaaggccgccaaatcaatcggcggcactgatgttattcgctttgtccagcacgatgcatccgatgaagcaggctggacggacctgttcgacaccaccgaggaggcattcggcccggttacgaccgtcgtgaacaatgcagggattgcagtttccaaaagcgttgaagacactaccacggaggaatggcgtaaactgctgtccgttaatctggatggtgtttttttcggcacccgtctgggcattcagcgcatgaaaaataaaggcttgggcgctagcatcatcaatatgagcagtattgctgggctcgtaggcgatccgacgctgggggcatacaacgcttccaagggggcggtacgtatcatgtcgaaaagcgcagcggtggattgcgcactgaaggactacgacgtgcgtgtcaacacagtacatccgggcgaaatcaagaccccgctggtcgatgatctggaaggtgctgaggaaatgatgtcacagcgtacgaaaacccctatgggccacattggcgaaccgaatgacatcgcatggatctgtgtgtacctggcatctgacgaatcgaaatttgcgacgggtgcagaatttgtggtcgacggcgggtataccgcacag

SEQ ID NO: 482 - protein, 252 aa, synthetic construct
  REGION 1..252: note = Variant of Ketone Reductase from L. kefir
MSDRLKGKVAIVTGGTLGIGLAIADKFVEEGAKVVITGRHADVGEKAAKSIGGTDVIRFVQHDASDEAGWTDLFDTTEEAFGPVTTVVNNAGIAVSKSVEDTTTEEWRKLLSVNLDGVFFGTRLGIQRMKNKGLGASIINMSSIAGLVGDPTLGAYNASKGAVRIMSKSAAVDCALKDYDVRVNTVHPGEIKTPLVDDLEGAEEMMSQRTKTPMGHIGEPNDIAWICVYLASDESKFATGAEFVVDGGYTAQ

SEQ ID NO: 483 - DNA, 756 bp, synthetic construct
  misc_feature 1..756: note = Variant of Ketone Reductase from L. kefir
  source 1..756: mol_type = other DNA
atgaccgatcgtctgaagggcaaagtagccatcgtaaccggcgggactctgggtatcggtttggcaatcgccgatcgctttgtagaggagggtgcgaaagtagttattactggtcgtcacgcggatgtaggtgaaaaggccgccaaatcaatcggcggcactgatgttattcgctttgtccagcacgatgcatccgatgaagcaggctggacgaaactgttcgacaccaccgaggaggcattcggcccggttacgaccgtcgtgaacaatgcagggattgcagtttccaaaagcgttgaagacactaccacggaggaatggcgtaaactgctgtccgttaatctggatggtgtttttttcggcacccgtctgggcattcagcgcatgaaaaataaaggcttgggcgctagcatcatcaatatgagcagtattgctgggctcgtaggcgatccgacgctgggggcatacaacgcttccaagggggcggtacgtatcatgtcgaaaagcgcagcgctgtattgcgcactgaaggactacgacgtgcgtgtcaacacagtacatccgggcgaaatcaagaccccgctggtcgatgatctggaaggtgctgaggaaatgatgtcacagcgtacgaaaacccctatgggccacattggcgaaccggacgacatcgcatggatctgtgtgtacctggcatctgacgaatcgaaatttgcgacgggtgcagaatttgtggtcgacggcgggtataccgcacag

SEQ ID NO: 484 - protein, 252 aa, synthetic construct
  REGION 1..252: note = Variant of Ketone Reductase from L. kefir
MTDRLKGKVAIVTGGTLGIGLAIADRFVEEGAKVVITGRHADVGEKAAKSIGGTDVIRFVQHDASDEAGWTKLFDTTEEAFGPVTTVVNNAGIAVSKSVEDTTTEEWRKLLSVNLDGVFFGTRLGIQRMKNKGLGASIINMSSIAGLVGDPTLGAYNASKGAVRIMSKSAALYCALKDYDVRVNTVHPGEIKTPLVDDLEGAEEMMSQRTKTPMGHIGEPDDIAWICVYLASDESKFATGAEFVVDGGYTAQ

SEQ ID NO: 485 - DNA, 756 bp, synthetic construct
  misc_feature 1..756: note = Variant of Ketone Reductase from L. kefir
  source 1..756: mol_type = other DNA
atgaccgatcgtctgaagggcaaagtagccatcgtaaccggcgggactctgggtatcggtaaagcaatcgccgataaatttgtagaggagggtgcgaaagtagttattactggtcgtcacgcggatgtaggtgaaaaggccgccaaatcaatcggcggcactgatgttattcgctttgtccagcacgatgcaagcgatgaagcaggctggacgacgctgttcgacaccaccgaggaggcattcggcccggttacgaccgtcgtgaacaatgcagggattgcagtttccaaaagcgttgaagacactgacacggaggaatggcgtaaactgctgtccgttaatctggatggtgtttttttcggcacccgtctgggcattcagcgcatgaaaaataaaggcttgggcgctagcatcatcaatatgagcagtattgctgggattgtaggcgatccgaagctgggggcatacaacgcttccaagggggcggtacgtatcatgtcgaaaagcgcagcgctggattgcgcactgaaggactacgatattcgtgtcaacacagtacatccgggcaggatcaagaccccactggtcgatgatctggaaggtgctgaggaaatgatgtcacagcgtacgaaaacccctatgggccacattggcgaaccgaatgacatcgcatggatctgtgtgtacctggcatctgacgaatcgaaatttgcgacgggtgcagaatttgtggtcgacggcgggtataccgcacag

SEQ ID NO: 486 - protein, 252 aa, synthetic construct
  REGION 1..252: note = Variant of Ketone Reductase from L. kefir
MTDRLKGKVAIVTGGTLGIGKAIADKFVEEGAKVVITGRHADVGEKAAKSIGGTDVIRFVQHDASDEAGWTTLFDTTEEAFGPVTTVVNNAGIAVSKSVEDTDTEEWRKLLSVNLDGVFFGTRLGIQRMKNKGLGASIINMSSIAGIVGDPKLGAYNASKGAVRIMSKSAALDCALKDYDIRVNTVHPGRIKTPLVDDLEGAEEMMSQRTKTPMGHIGEPNDIAWICVYLASDESKFATGAEFVVDGGYTAQ

SEQ ID NO: 487 - DNA, 756 bp, synthetic construct
  misc_feature 1..756: note = Variant of Ketone Reductase from L. kefir
  source 1..756: mol_type = other DNA
atgaccgatcgtctgaagggcaaagtagccatcgtaaccggcgggactcgtggtatcggtaaagcaatcgccgataaatttgtagaggagggtgcgaaagtagttattactggtcgtcacgcggatgtaggtgaaaaggccgccaaatcaatcggcggcactgatgttattcgctttgtccagcacgatgcaagcgatgaagcaggctggacgacgctgttcgacaccaccgaggaggcattcggcccggttacgaccgtcgtgaacaatgcagggattgcagtttccaaaagcgttgaagacactgacacggaggaatggcgtaaactgctgtccgttaatctggatggtgtttttttcggcacccgtctgggcattcagcgcatgaaaaataaaggcttgggcgctagcatcatcaatatgagcagtattgctgggattgtaggcgatccgaagctgggggcatacaacgcttccaagggggcggtacgtatcatgtcgaaaagcgcagcgctggattgcgcactgaaggactacgatattcgtgtcaacacagtacatccgggcgaaatcaagaccccactggtcgatgatctggaaggtgctgaggaaatgatgtcacagcgtacgaaaacccctatgggccacattggcgaaccgaatgacatcgcatggatctgtgtgtacctggcatctgacgaatcgaaatttgcgacgggtgcagaatttgtggtcgacggcgggtataccgcacag

SEQ ID NO: 488 - protein, 252 aa, synthetic construct
  REGION 1..252: note = Variant of Ketone Reductase from L. kefir
MTDRLKGKVAIVTGGTRGIGKAIADKFVEEGAKVVITGRHADVGEKAAKSIGGTDVIRFVQHDASDEAGWTTLFDTTEEAFGPVTTVVNNAGIAVSKSVEDTDTEEWRKLLSVNLDGVFFGTRLGIQRMKNKGLGASIINMSSIAGIVGDPKLGAYNASKGAVRIMSKSAALDCALKDYDIRVNTVHPGEIKTPLVDDLEGAEEMMSQRTKTPMGHIGEPNDIAWICVYLASDESKFATGAEFVVDGGYTAQ

SEQ ID NO: 489 - DNA, 756 bp, synthetic construct
  misc_feature 1..756: note = Variant of Ketone Reductase from L. kefir
  source 1..756: mol_type = other DNA
atgaccgatcgtctgaagggcaaagtagccatcgtaaccggcgggactctgggtatcggtaaagcaatcgccgataaatttgtagaggagggtgcgaaagtagttattactggtcgtcacgcggataggggtgaaaaggccgccaaatcaatcggcggcactgatgttattcgctttgtccagcacgatgcaagcgatgaagcaggctggacgacgctgttcgacaccaccgaggaggcattcggcccggttacgaccgtcgtgaacaatgcagggattgcagtttccaaaagcgttgaagacactgacacggaggaatggcgtaaactgctgtccgttaatctggatggtgtttttttcggcacccgtctgggcattcagcgcatgaaaaataaaggcttgggcgctagcatcatcaatatgagcagtattgctgggattgtaggcgatccgaagctgggggcatacaacgcttccaagggggcggtacgtatcatgtcgaaaagcgcagcgctggattgcgcactgaaggactacgatattcgtgtcaacacagtacatccgggcgaaatcaagaccccactggtcgatgatctggaaggtgctgaggaaatgatgtcacagcgtacgaaaacccctatgggccacattggcgaaccgaatgacatcgcatggatctgtgtgtacctggcatctgacgaatcgaaatttgcgacgggtgcagaatttgtggtcgacggcgggtataccgcacag

SEQ ID NO: 490 - protein, 252 aa, synthetic construct
  REGION 1..252: note = Variant of Ketone Reductase from L. kefir
MTDRLKGKVAIVTGGTLGIGKAIADKFVEEGAKVVITGRHADRGEKAAKSIGGTDVIRFVQHDASDEAGWTTLFDTTEEAFGPVTTVVNNAGIAVSKSVEDTDTEEWRKLLSVNLDGVFFGTRLGIQRMKNKGLGASIINMSSIAGIVGDPKLGAYNASKGAVRIMSKSAALDCALKDYDIRVNTVHPGEIKTPLVDDLEGAEEMMSQRTKTPMGHIGEPNDIAWICVYLASDESKFATGAEFVVDGGYTAQ

SEQ ID NO: 491 - DNA, 756 bp, synthetic construct
  misc_feature 1..756: note = Variant of Ketone Reductase from L. kefir
  source 1..756: mol_type = other DNA
atgaccgatcgtctgaagggcaaagtagccatcgtaaccggcgggactctgggtatcggtaaagcaatcgccgataaatttgtagaggagggtgcgaaagtagttattactggtcgtcacgcggatgtaggtgaaaaggccgccaaatcaatcggcggcactgatgttattcgctttgtccagcacgatgcaagcgatgaagcaggctggacgacgctgttcgacaccaccgaggaggcattcggcccggttacgaccgtcgtgaacaatgcagggattgcagtttccaaaagcgttgaagacactgacacggaggaatggcgtaaactgctgtccgttaatctggatggtgtttttttcggcacccgtctgggcattcagcgcatgaaaaataaaggcttgggcgctagcatcatcaatatgagcagtattgctgggattgtaggcgatccgaagctgggggcatacaacgcttccaagggggcggtacgtatcatgtcgaaaagcgcagcgctggattgcgcactgaaggactacgatattcgtgtcaacacagtacatccgggcgaaatcaagaccccactggtcgatgatctggaaggtgctgaggaaatgatgtcacagcgtacgaaaacccctatgggccacattggcgaaccgaatgacatcgcatggatctgtgtgtacctggcatctgacgaatcgaaatttgcgacgggtgcagaatttgtggtcgacggcgggtatcttgcacag

SEQ ID NO: 492 - protein, 252 aa, synthetic construct
  REGION 1..252: note = Variant of Ketone Reductase from L. kefir
MTDRLKGKVAIVTGGTLGIGKAIADKFVEEGAKVVITGRHADVGEKAAKSIGGTDVIRFVQHDASDEAGWTTLFDTTEEAFGPVTTVVNNAGIAVSKSVEDTDTEEWRKLLSVNLDGVFFGTRLGIQRMKNKGLGASIINMSSIAGIVGDPKLGAYNASKGAVRIMSKSAALDCALKDYDIRVNTVHPGEIKTPLVDDLEGAEEMMSQRTKTPMGHIGEPNDIAWICVYLASDESKFATGAEFVVDGGYLAQ

SEQ ID NO: 493 - DNA, 756 bp, synthetic construct
  misc_feature 1..756: note = Variant of Ketone Reductase from L. kefir
  source 1..756: mol_type = other DNA
atgaccgatcgtctgaagggcaaagtagccatcgtaaccggcgggactatgggtatcggtaaagcaatcgccgataaatttgtagaggagggtgcgaaagtagttattactggtcgtcacgcggatgtaggtgaaaaggccgccaaatcaatcggcggcactgatgttattcgctttgtccagcacgatgcaagcgatgaagcaggctggacgacgctgttcgacaccaccgaggaggcattcggcccggttacgaccgtcgtgaacaatgcagggattgcagtttccaaaagcgttgaagacactgacacggaggaatggcgtaaactgctgtccgttaatctggatggtgtttttttcggcacccgtctgggcattcagcgcatgaaaaataaaggcttgggcgctagcatcatcaatatgagcagtattgctgggattgtaggcgatccgaagctgggggcatacaacgcttccaagggggcggtacgtatcatgtcgaaaagcgcagcgctggattgcgcactgaaggactacgatattcgtgtcaacacagtacatccgggcgaaatcaagaccccactggtcgatgatctggaaggtgctgaggaaatgatgtcacagcgtacgaaaacccctatgggccacattggcgaaccgaatgacatcgcatggatctgtgtgtacctggcatctgacgaatcgaaatttgcgacgggtgcagaatttgtggtcgacggcgggtataccgcacag

SEQ ID NO: 494 - protein, 252 aa, synthetic construct
  REGION 1..252: note = Variant of Ketone Reductase from L. kefir
MTDRLKGKVAIVTGGTMGIGKAIADKFVEEGAKVVITGRHADVGEKAAKSIGGTDVIRFVQHDASDEAGWTTLFDTTEEAFGPVTTVVNNAGIAVSKSVEDTDTEEWRKLLSVNLDGVFFGTRLGIQRMKNKGLGASIINMSSIAGIVGDPKLGAYNASKGAVRIMSKSAALDCALKDYDIRVNTVHPGEIKTPLVDDLEGAEEMMSQRTKTPMGHIGEPNDIAWICVYLASDESKFATGAEFVVDGGYTAQ

SEQ ID NO: 495 - DNA, 756 bp, synthetic construct
  misc_feature 1..756: note = Variant of Ketone Reductase from L. kefir
  source 1..756: mol_type = other DNA
atgaccgatcgtctgaagggcaaagtagccatcgtaaccggcgggactaagggtatcggtaaagcaatcgccgataaatttgtagaggagggtgcgaaagtagttattactggtcgtcacgcggatgtaggtgaaaaggccgccaaatcaatcggcggcactgatgttattcgctttgtccagcacgatgcaagcgatgaagcaggctggacgacgctgttcgacaccaccgaggaggcattcggcccggttacgaccgtcgtgaacaatgcagggattgcagtttccaaaagcgttgaagacactgacacggaggaatggcgtaaactgctgtccgttaatctggatggtgtttttttcggcacccgtctgggcattcagcgcatgaaaaataaaggcttgggcgctagcatcatcaatatgagcagtattgctgggattgtaggcgatccgaagctgggggcatacaacgcttccaagggggcggtacgtatcatgtcgaaaagcgcagcgctggattgcgcactgaaggactacgatattcgtgtcaacacagtacatccgggcgaaatcaagaccccactggtcgatgatctggaaggtgctgaggaaatgatgtcacagcgtacgaaaacccctatgggccacattggcgaaccgaatgacatcgcatggatctgtgtgtacctggcatctgacgaatcgaaatttgcgacgggtgcagaatttgtggtcgacggcgggtataccgcacag

SEQ ID NO: 496 - protein, 252 aa, synthetic construct
  REGION 1..252: note = Variant of Ketone Reductase from L. kefir
MTDRLKGKVAIVTGGTKGIGKAIADKFVEEGAKVVITGRHADVGEKAAKSIGGTDVIRFVQHDASDEAGWTTLFDTTEEAFGPVTTVVNNAGIAVSKSVEDTDTEEWRKLLSVNLDGVFFGTRLGIQRMKNKGLGASIINMSSIAGIVGDPKLGAYNASKGAVRIMSKSAALDCALKDYDIRVNTVHPGEIKTPLVDDLEGAEEMMSQRTKTPMGHIGEPNDIAWICVYLASDESKFATGAEFVVDGGYTAQ

SEQ ID NO: 497 - DNA, 756 bp, synthetic construct
  misc_feature 1..756: note = Variant of Ketone Reductase from L. kefir
  source 1..756: mol_type = other DNA
atgaccgatcgtctgaagggcaaagtagccatcgtaaccggcgggactctgggtatcggtaaagcaatcgccgataaatttgtagaggagggtgcgaaagtagttattactggtcgtcacgcggatgtaggtcataaggccgccaaatcaatcggcggcactgatgttattcgctttgtccagcacgatgcaagcgatgaagcaggctggacgacgctgttcgacaccaccgaggaggcattcggcccggttacgaccgtcgtgaacaatgcagggattgcagtttccaaaagcgttgaagacactgacacggaggaatggcgtaaactgctgtccgttaatctggatggtgtttttttcggcacccgtctgggcattcagcgcatgaaaaataaaggcttgggcgctagcatcatcaatatgagcagtattgctgggattgtaggcgatccgaagctgggggcatacaacgcttccaagggggcggtacgtatcatgtcgaaaagcgcagcgctggattgcgcactgaaggactacgatattcgtgtcaacacagtacatccgggcgaaatcaagaccccactggtcgatgatctggaaggtgctgaggaaatgatgtcacagcgtacgaaaacccctatgggccacattggcgaaccgaatgacatcgcatggatctgtgtgtacctggcatctgacgaatcgaaatttgcgacgggtgcagaatttgtggtcgacggcgggtataccgcacag

SEQ ID NO: 498 - protein, 252 aa, synthetic construct
  REGION 1..252: note = Variant of Ketone Reductase from L. kefir
MTDRLKGKVAIVTGGTLGIGKAIADKFVEEGAKVVITGRHADVGHKAAKSIGGTDVIRFVQHDASDEAGWTTLFDTTEEAFGPVTTVVNNAGIAVSKSVEDTDTEEWRKLLSVNLDGVFFGTRLGIQRMKNKGLGASIINMSSIAGIVGDPKLGAYNASKGAVRIMSKSAALDCALKDYDIRVNTVHPGEIKTPLVDDLEGAEEMMSQRTKTPMGHIGEPNDIAWICVYLASDESKFATGAEFVVDGGYTAQ

SEQ ID NO: 499 - DNA, 756 bp, synthetic construct
  misc_feature 1..756: note = Variant of Ketone Reductase from L. kefir
  source 1..756: mol_type = other DNA
atgaccgatcgtctgaagggcaaagtagccatcgtaaccggcgggactctgggtatcggtaaagcaatcgccgataaatttgtagaggagggtgcgaaagtagttattactggtcgtcacgcggatgtaggtgaaaaggccgccaaatcaatcggcggcccggatgttattcgctttgtccagcacgatgcaagcgatgaagcaggctggacgacgctgttcgacaccaccgaggaggcattcggcccggttacgaccgtcgtgaacaatgcagggattgcagtttccaaaagcgttgaagacactgacacggaggaatggcgtaaactgctgtccgttaatctggatggtgtttttttcggcacccgtctgggcattcagcgcatgaaaaataaaggcttgggcgctagcatcatcaatatgagcagtattgctgggattgtaggcgatccgaagctgggggcatacaacgcttccaagggggcggtacgtatcatgtcgaaaagcgcagcgctggattgcgcactgaaggactacgatattcgtgtcaacacagtacatccgggcgaaatcaagaccccactggtcgatgatctggaaggtgctgaggaaatgatgtcacagcgtacgaaaacccctatgggccacattggcgaaccgaatgacatcgcatggatctgtgtgtacctggcatctgacgaatcgaaatttgcgacgggtgcagaatttgtggtcgacggcgggtataccgcacag

SEQ ID NO: 500 - protein, 252 aa, synthetic construct
  REGION 1..252: note = Variant of Ketone Reductase from L. kefir
MTDRLKGKVAIVTGGTLGIGKAIADKFVEEGAKVVITGRHADVGEKAAKSIGGPDVIRFVQHDASDEAGWTTLFDTTEEAFGPVTTVVNNAGIAVSKSVEDTDTEEWRKLLSVNLDGVFFGTRLGIQRMKNKGLGASIINMSSIAGIVGDPKLGAYNASKGAVRIMSKSAALDCALKDYDIRVNTVHPGEIKTPLVDDLEGAEEMMSQRTKTPMGHIGEPNDIAWICVYLASDESKFATGAEFVVDGGYTAQ

SEQ ID NO: 501 - DNA, 756 bp, synthetic construct
  misc_feature 1..756: note = Variant of Ketone Reductase from L. kefir
  source 1..756: mol_type = other DNA
atgaccgatcgtctgaagggcaaagtagccatcgtaaccggcgggactctgggtatcggtaaagcaatcgccgataaatttgtagaggagggtgcgaaagtagttattactggtcgtcacgcggatgtaggtgaaaaggccgccaaatcaatcggcggcactgatgttattcgctttgtccagcacgatgcaagcgatgaagcaggctggacgacgctgttcgacaccaccgaggaggcattcggcccggttacgaccgtcgtgaacaatgcagggattgcagtttccaaaagcgttgaagacactgacacggaggaatggcgtaaactgctgtccgttaatctggatggtgtttttttcggcacccgtctgggcattcagcgcatgaaaaataaaggcttgggcgctagcatcatcaatatgagcagtattgctgggattgtaggcgatccgaagctgggggcatacaacgcttccaagggggcggtacgtatcatgtcgaaaagcgcagcgctggattgcgcactgaaggactacgatattcgtgtcaacacagtacatccgggcgaaatcaagacccggctggtcgatgatctggaaggtgctgaggaaatgatgtcacagcgtacgaaaacccctatgggccacattggcgaaccgaatgacatcgcatggatctgtgtgtacctggcatctgacgaatcgaaatttgcgacgggtgcagaatttgtggtcgacggcgggtataccgcacag

SEQ ID NO: 502 - protein, 252 aa, synthetic construct
  REGION 1..252: note = Variant of Ketone Reductase from L. kefir
MTDRLKGKVAIVTGGTLGIGKAIADKFVEEGAKVVITGRHADVGEKAAKSIGGTDVIRFVQHDASDEAGWTTLFDTTEEAFGPVTTVVNNAGIAVSKSVEDTDTEEWRKLLSVNLDGVFFGTRLGIQRMKNKGLGASIINMSSIAGIVGDPKLGAYNASKGAVRIMSKSAALDCALKDYDIRVNTVHPGEIKTRLVDDLEGAEEMMSQRTKTPMGHIGEPNDIAWICVYLASDESKFATGAEFVVDGGYTAQ

SEQ ID NO: 503 - DNA, 756 bp, synthetic construct
  misc_feature 1..756: note = Variant of Ketone Reductase from L. kefir
  source 1..756: mol_type = other DNA
atgaccgatcgtctgaagggcaaagtagccatcgtaaccggcgggactctgggtatcggtaaagcaatcgccgataaatttgtagaggagggtgcgaaagtagttattactggtcgtcacgcggatgtaggtgaaaaggccgccaaatcaatcggcggcactgatgttattcgctttgtccagcacgatgcaagcgatgaagcaggctggacgacgctgttcgacaccaccgaggaggcattcggcccggttacgaccgtcgtgaacaatgcagggattgcagtttccaaaagcgttgaagacactgacacggaggaatggcgtaaactgctgtccgttaatctggatggtgtttttttcggcacccgtctgggcattcagcgcatgaaaaataaaggcttgggcgctagcatcatcaatatgagcagtattgctgggattgtaggcgatccgaagctgggggcatacaacgcttccaagggggcggtacgtatcatgtcgaaaagcgcagcgctggattgcgcactgaaggactacgatattcgtgtcaacacagtacatccgggcgaaatcaagaccccactggtcgatgatctggaaggtgctgaggaagagatgtcacagcgtacgaaaacccctatgggccacattggcgaaccgaatgacatcgcatggatctgtgtgtacctggcatctgacgaatcgaaatttgcgacgggtgcagaatttgtggtcgacggcgggtataccgcacag

SEQ ID NO: 504 - protein, 252 aa, synthetic construct
  REGION 1..252: note = Variant of Ketone Reductase from L. kefir
MTDRLKGKVAIVTGGTLGIGKAIADKFVEEGAKVVITGRHADVGEKAAKSIGGTDVIRFVQHDASDEAGWTTLFDTTEEAFGPVTTVVNNAGIAVSKSVEDTDTEEWRKLLSVNLDGVFFGTRLGIQRMKNKGLGASIINMSSIAGIVGDPKLGAYNASKGAVRIMSKSAALDCALKDYDIRVNTVHPGEIKTPLVDDLEGAEEEMSQRTKTPMGHIGEPNDIAWICVYLASDESKFATGAEFVVDGGYTAQ

SEQ ID NO: 505 - DNA, 756 bp, synthetic construct
  misc_feature 1..756: note = Variant of Ketone Reductase from L. kefir
  source 1..756: mol_type = other DNA
atgaccgatcgtctgaagggcaaagtagccatcgtaaccggcgggactctgggtatcggtaaagcaatcgccgataaatttgtagaggagggtgcgaaagtagttattactggtcgtcacgcggatgtaggtgaaaaggccgccaaatcaatcggcggcactgatgttattcgctttgtccagcacgatgcaagcgatgaagcaggctggacgacgctgttcgacaccaccgaggaggcattcggcccggttacgaccgtcgtgaacaatgcagggattgcggtttccaaaagcgttgaagacactgacacggaggaatggcgtaaactgctgtccgttaatctggatggtgtttttttcggcacccgtctgggcattcagcgcatgaaaaataaaggcttgggcgctagcatcatcaatatgagcagtattgctgggattgtaggcgatccgaagctgggggcatacaacgcttccaagggggcggtacgtatcatgtcgaaaagcgcagcgctggattgcgcactgaaggactacgatattcgtgtcaacacagtacatccgggcgaaatcaagaccccactggtcgatgcgctggaaggtgctgaggaaatgatgtcacagcgtacgaaaacccctatgggccacattggcgaaccgaatgacatcgcatggatctgtgtgtacctggcatctgacgaatcgaaatttgcgacgggtgcagaatttgtggtcgacggcgggtataccgcacag

SEQ ID NO: 506 - protein, 252 aa, synthetic construct
  REGION 1..252: note = Variant of Ketone Reductase from L. kefir
MTDRLKGKVAIVTGGTLGIGKAIADKFVEEGAKVVITGRHADVGEKAAKSIGGTDVIRFVQHDASDEAGWTTLFDTTEEAFGPVTTVVNNAGIAVSKSVEDTDTEEWRKLLSVNLDGVFFGTRLGIQRMKNKGLGASIINMSSIAGIVGDPKLGAYNASKGAVRIMSKSAALDCALKDYDIRVNTVHPGEIKTPLVDALEGAEEMMSQRTKTPMGHIGEPNDIAWICVYLASDESKFATGAEFVVDGGYTAQ

SEQ ID NO: 507 - DNA, 756 bp, synthetic construct
  misc_feature 1..756: note = Variant of Ketone Reductase from L. kefir
  source 1..756: mol_type = other DNA
atgaccgatcgtctgaagggcaaagtagccatcgtaaccggcgggactctgggtatcggtaaagcaatcgccgataaatttgtagaggagggtgcgaaagtagttattactggtcgtcacgcggatgtaggtgaaaaggccgccaaatcaatcggcggcactgatgttattcgctttgtccagcacgatgcaagcgatgaagcaggctggacgacgctgttcgacaccaccgaggaggcattcggcccggttacgaccgtcgtgaacaatgcagggattgcagtttccaaaagcgttgaagacactgacacggaggaatggcgtaaactgctgtccgttaatctggatggtgtttttttcggcacccgtctgggcattcagcgcatgaaaaataaaggcttgggcgctagcatcatcaatatgagcagtattgctgggattgtaggcgatccgaagctgggggcatacaacgcttccaagggggcggtacgtatcatgtcgaaaagcgcagcgctggattgcgcactgaaggactacgatattcgtgtcaacacagtacatccgggcctgatcaagaccccactggtcgatgatctggaaggtgctgaggaaatgatgtcacagcgtacgaaaacccctatgggccacattggcgaaccgaatgacatcgcatggatctgtgtgtacctggcatctgacgaatcgaaatttgcgacgggtgcagaatttgtggtcgacggcgggtataccgcacag

SEQ ID NO: 508 - protein, 252 aa, synthetic construct
  REGION 1..252: note = Variant of Ketone Reductase from L. kefir
MTDRLKGKVAIVTGGTLGIGKAIADKFVEEGAKVVITGRHADVGEKAAKSIGGTDVIRFVQHDASDEAGWTTLFDTTEEAFGPVTTVVNNAGIAVSKSVEDTDTEEWRKLLSVNLDGVFFGTRLGIQRMKNKGLGASIINMSSIAGIVGDPKLGAYNASKGAVRIMSKSAALDCALKDYDIRVNTVHPGLIKTPLVDDLEGAEEMMSQRTKTPMGHIGEPNDIAWICVYLASDESKFATGAEFVVDGGYTAQ

SEQ ID NO: 509 - DNA, 756 bp, synthetic construct
  misc_feature 1..756: note = Variant of Ketone Reductase from L. kefir
  source 1..756: mol_type = other DNA
atgaccgatcgtctgaagggcaaagtagccatcgtaaccggcgggactctgggtatcggtaaagcaatcgccgataaatttgtagaggagggtgcgaaagtagttattactggtcgtcacgcggatgtaggtgaaaaggccgccaaatcaatcggcggcactgatgttattcgctttgtccagcacgatgcaagcgatgaagcaggctggacgacgctgttcgacaccaccgaggaggcattcggcccggttacgaccgtcgtgaacaatgcagggattgcagtttccaaaagcgttgaagacactgacacggaggaatggcgtaaactgctgtccgttaatctggatggtgtttttttcggcacccgtctgggcattcagcgcatgaaaaataaaggcttgggcgctagcatcatcaatatgagcagtattgctgggattgtaggcgatccgaagctgggggcatacaacgcttccaagggggcggtacgtatcatgtcgaaaagcgcagcgctggattgcgcactgaaggactacgatattcgtgtcaacacagtacatccgggcgtgatcaagaccccactggtcgatgatctggaaggtgctgaggaaatgatgtcacagcgtacgaaaacccctatgggccacattggcgaaccgaatgacatcgcatggatctgtgtgtacctggcatctgacgaatcgaaatttgcgacgggtgcagaatttgtggtcgacggcgggtataccgcacag

SEQ ID NO: 510 - protein, 252 aa, synthetic construct
  REGION 1..252: note = Variant of Ketone Reductase from L. kefir
MTDRLKGKVAIVTGGTLGIGKAIADKFVEEGAKVVITGRHADVGEKAAKSIGGTDVIRFVQHDASDEAGWTTLFDTTEEAFGPVTTVVNNAGIAVSKSVEDTDTEEWRKLLSVNLDGVFFGTRLGIQRMKNKGLGASIINMSSIAGIVGDPKLGAYNASKGAVRIMSKSAALDCALKDYDIRVNTVHPGVIKTPLVDDLEGAEEMMSQRTKTPMGHIGEPNDIAWICVYLASDESKFATGAEFVVDGGYTAQ

SEQ ID NO: 511 - DNA, 756 bp, synthetic construct
  misc_feature 1..756: note = Variant of Ketone Reductase from L. kefir
  source 1..756: mol_type = other DNA
atgaccgatcgtctgaagggcaaagtagccatcgtaaccggcgggactctgggtatcggtaaagcaatcgccgataaatttgtagaggagggtgcgaaagtagttattactggtcgtcacgcggatgtaggtgaaaaggccgccaaatcaatcggcggcactgatgttattcgctttgtccagcacgatgcaagcgatgaagcaggctggacgacgctgttcgacaccaccgaggaggcattcggcccggttacgaccgtcgtgaacaatgcagggattgcagtttccaaaagcgttgaagacactgacacggaggaatggcgtaaactgctgtccgttaatctggatggtgtttttttcggcacccgtctgggcattcagcgcatgaaaaataaaggcttgggcgctagcatcatcaatatgagcagtattgctgggattgtaggcgatccgaagctgggggcatacaacgcttccaagggggcggtacgtatcatgtcgaaaagcgcagcgctggattgcgcactgaaggactacgatattcgtgtcaacacagtacatccgggccagatcaagaccccactggtcgatgatctggaaggtgctgaggaaatgatgtcacagcgtacgaaaacccctatgggccacattggcgaaccgaatgacatcgcatggatctgtgtgtacctggcatctgacgaatcgaaatttgcgacgggtgcagaatttgtggtcgacggcgggtataccgcacag

SEQ ID NO: 512 - protein, 252 aa, synthetic construct
  REGION 1..252: note = Variant of Ketone Reductase from L. kefir
MTDRLKGKVAIVTGGTLGIGKAIADKFVEEGAKVVITGRHADVGEKAAKSIGGTDVIRFVQHDASDEAGWTTLFDTTEEAFGPVTTVVNNAGIAVSKSVEDTDTEEWRKLLSVNLDGVFFGTRLGIQRMKNKGLGASIINMSSIAGIVGDPKLGAYNASKGAVRIMSKSAALDCALKDYDIRVNTVHPGQIKTPLVDDLEGAEEMMSQRTKTPMGHIGEPNDIAWICVYLASDESKFATGAEFVVDGGYTAQ

SEQ ID NO: 513 - DNA, 756 bp, synthetic construct
  misc_feature 1..756: note = Variant of Ketone Reductase from L. kefir
  source 1..756: mol_type = other DNA
atgaccgatcgtctgaagggcaaagtagccatcgtaaccggcgggactctgggtatcggtaaagcaatcgccgataaatttgtagaggagggtgcgaaagtagttattactggtcgtcacgcggatgtaggtgaaaaggccgccaaatcaatcggcggcactgatgttattcgctttgtccagcacgatgcaagcgatgaagcaggctgggggacgctgttcgacaccaccgaggaggcattcggcccggttacgaccgtcgtgaacaatgcagggattgcagtttccaaaagcgttgaagacactgacacggaggaatggcgtaaactgctgtccgttaatctggatggtgtttttttcggcacccgtctgggcattcagcgcatgaaaaataaaggcttgggcgctagcatcatcaatatgagcagtattgctgggattgtaggcgatccgaagctgggggcatacaacgcttccaagggggcggtacgtatcatgtcgaaaagcgcagcgctggattgcgcactgaaggactacgatattcgtgtcaacacagtacatccgggcgaaatcaagaccccactggtcgatgatctggaaggtgctgaggaaatgatgtcacagcgtacgaaaacccctatgggccacattggcgaaccgaatgacatcgcatggatctgtgtgtacctggcatctgacgaatcgaaatttgcgacgggtgcagaatttgtggtcgacggcgggtataccgcacag

SEQ ID NO: 514 - protein, 252 aa, synthetic construct
  REGION 1..252: note = Variant of Ketone Reductase from L. kefir
MTDRLKGKVAIVTGGTLGIGKAIADKFVEEGAKVVITGRHADVGEKAAKSIGGTDVIRFVQHDASDEAGWGTLFDTTEEAFGPVTTVVNNAGIAVSKSVEDTDTEEWRKLLSVNLDGVFFGTRLGIQRMKNKGLGASIINMSSIAGIVGDPKLGAYNASKGAVRIMSKSAALDCALKDYDIRVNTVHPGEIKTPLVDDLEGAEEMMSQRTKTPMGHIGEPNDIAWICVYLASDESKFATGAEFVVDGGYTAQ

SEQ ID NO: 515 - DNA, 756 bp, synthetic construct
  misc_feature 1..756: note = Variant of Ketone Reductase from L. kefir
  source 1..756: mol_type = other DNA
atgaccgatcgtctgaagggcaaagtagccatcgtaaccggcgggactctgggtatcggtaaagcaatcgccgataaatttgtagaggagggtgcgaaagtagttattactggtcgtcacgcggatgtaggtgaaaaggccgccaaatcaatcggcggcactgatgttattcgctttgtccagcacgatgcaagcgatgaagcaggctggacgacgctgttcgacaccaccgaggaggcattcggcccggttacgaccgtcgtgaacaatgcagggattgcagtttccaaaagcgttgaagacactgacacggaggaatggcgtaaactgctgtccgttaatctggatggtgtttttttcggcacccgtctgggcattcagcgcatgaaaaataaaggcttgggcgctagcatcatcaatatgagcagtattgctgggattgtaggcgatccgaagctgggggcatacaacgcttccaagggggcggtacgtatcatgtcgaaaagcgcagcgctggattgcgcactgaaggactacgatattcgtgtcaacacagtacatccgggcgaaatcaagaccccaatggtcgatgatctggaaggtgctgaggaaatgatgtcacagcgtacgaaaacccctatgggccacattggcgaaccgaatgacatcgcatggatctgtgtgtacctggcatctgacgaatcgaaatttgcgacgggtgcagaatttgtggtcgacggcgggtataccgcacag

SEQ ID NO: 516 - protein, 252 aa, synthetic construct
  REGION 1..252: note = Variant of Ketone Reductase from L. kefir
MTDRLKGKVAIVTGGTLGIGKAIADKFVEEGAKVVITGRHADVGEKAAKSIGGTDVIRFVQHDASDEAGWTTLFDTTEEAFGPVTTVVNNAGIAVSKSVEDTDTEEWRKLLSVNLDGVFFGTRLGIQRMKNKGLGASIINMSSIAGIVGDPKLGAYNASKGAVRIMSKSAALDCALKDYDIRVNTVHPGEIKTPMVDDLEGAEEMMSQRTKTPMGHIGEPNDIAWICVYLASDESKFATGAEFVVDGGYTAQ

SEQ ID NO: 517 - DNA, 756 bp, synthetic construct
  misc_feature 1..756: note = Variant of Ketone Reductase from L. kefir
  source 1..756: mol_type = other DNA
atgaccgatcgtctgaagggcaaagtagccatcgtaaccggcgggactctgggtatcggtaaagcaatcgccgataaatttgtagaggagggtgcgaaagtagttattactggtcgtcacgcggatgtaggtgaaaaggccgccaaatcaatcggcggcactgatgttattcgctttgtccagcacgatgcaagcgatgaagcaggctggacgacgctgttcgacaccaccgaggaggcattcggcccggttacgaccgtcgtgaacaatgcagggattgcagtttccaaaagcgttgaagacactgacacggaggaatggcgtaaactgctgtccgttaatctggatggtgtttttttcggcacccgtctgggcattcagcgcatgaaaaataaaggcttgggcgctagcatcatcaatatgagcagtattgctgggattgtaggcgatccgaagctgggggcatacaacgcttccaagggggcggtacgtatcatgtcgaaaagcgcagcgctggattgcgcactgaaggactacgatattcgtgtcaacacagtacatccgggcgaaatcaagaccccactggtcgataggctggaaggtgctgaggaaatgatgtcacagcgtacgaaaacccctatgggccacattggcgaaccgaatgacatcgcatggatctgtgtgtacctggcatctgacgaatcgaaatttgcgacgggtgcagaatttgtggtcgacggcgggtataccgcacag

SEQ ID NO: 518 - protein, 252 aa, synthetic construct
  REGION 1..252: note = Variant of Ketone Reductase from L. kefir
MTDRLKGKVAIVTGGTLGIGKAIADKFVEEGAKVVITGRHADVGEKAAKSIGGTDVIRFVQHDASDEAGWTTLFDTTEEAFGPVTTVVNNAGIAVSKSVEDTDTEEWRKLLSVNLDGVFFGTRLGIQRMKNKGLGASIINMSSIAGIVGDPKLGAYNASKGAVRIMSKSAALDCALKDYDIRVNTVHPGEIKTPLVDRLEGAEEMMSQRTKTPMGHIGEPNDIAWICVYLASDESKFATGAEFVVDGGYTAQ

SEQ ID NO: 519 - DNA, 756 bp, synthetic construct
  misc_feature 1..756: note = Variant of Ketone Reductase from L. kefir
  source 1..756: mol_type = other DNA
atgaccgatcgtctgaagggcaaagtagccatcgtaaccggcgggactctgggtatcggtaaagcaatcgccgataaatttgtagaggagggtgcgaaagtagttattactggtcgtcacgcggatgtaggtgaaaaggccgccaaatcaatcggcggcactgatgttattcgctttgtccagcacgatgcaagcgatgaagcaggctggacgacgctgttcgacaccaccgaggaggcattcggcccggttacgaccgtcgtgaacaatgcagggattgcagtttccaaaagcgttgaagacactgacacggaggaatggcgtaaactgctgtccgttaatctggatggtgtttttttcggcacccgtctgggcattcagcgcatgaaaaataaaggcttgggcgctagcatcatcaatatgagcagtattgctgggattgtaggcgatccgaagctgggggcatacaacgcttccaagggggcggtacgtatcatgtcgaaaagcgcagcgctggattgcgcactgaaggactacgatattcgtgtcaacacagtacatccgggcgctatcaagaccccactggtcgatgatctggaaggtgctgaggaaatgatgtcacagcgtacgaaaacccctatgggccacattggcgaaccgaatgacatcgcatggatctgtgtgtacctggcatctgacgaatcgaaatttgcgacgggtgcagaatttgtggtcgacggcgggtataccgcacag

SEQ ID NO: 520 - protein, 252 aa, synthetic construct
  REGION 1..252: note = Variant of Ketone Reductase from L. kefir
MTDRLKGKVAIVTGGTLGIGKAIADKFVEEGAKVVITGRHADVGEKAAKSIGGTDVIRFVQHDASDEAGWTTLFDTTEEAFGPVTTVVNNAGIAVSKSVEDTDTEEWRKLLSVNLDGVFFGTRLGIQRMKNKGLGASIINMSSIAGIVGDPKLGAYNASKGAVRIMSKSAALDCALKDYDIRVNTVHPGAIKTPLVDDLEGAEEMMSQRTKTPMGHIGEPNDIAWICVYLASDESKFATGAEFVVDGGYTAQ

SEQ ID NO: 521 - DNA, 756 bp, synthetic construct
  misc_feature 1..756: note = Variant of Ketone Reductase from L. kefir
  source 1..756: mol_type = other DNA
atgaccgatcgtctgaagggcaaagtagccatcgtaaccggcgggactctgggtatcggtaaagcaatcgccgataaatttgtagaggagggtgcgaaagtagttattactggtcgtcacgcggatgtaggtgaaaaggccgccaaatcaatcggcggcactgatgttattcgctttgtccagcacgatgcaagcgatgaagcaggctgggagacgctgttcgacaccaccgaggaggcattcggcccggttacgaccgtcgtgaacaatgcagggattgcagtttccaaaagcgttgaagacactgacacggaggaatggcgtaaactgctgtccgttaatctggatggtgtttttttcggcacccgtctgggcattcagcgcatgaaaaataaaggcttgggcgctagcatcatcaatatgagcagtattgctgggattgtaggcgatccgaagctgggggcatacaacgcttccaagggggcggtacgtatcatgtcgaaaagcgcagcgctggattgcgcactgaaggactacgatattcgtgtcaacacagtacatccgggcgaaatcaagaccccactggtcgatgatctggaaggtgctgaggaaatgatgtcacagcgtacgaaaacccctatgggccacattggcgaaccgaatgacatcgcatggatctgtgtgtacctggcatctgacgaatcgaaatttgcgacgggtgcagaatttgtggtcgacggcgggtataccgcacag

SEQ ID NO: 522 - protein, 252 aa, synthetic construct
  REGION 1..252: note = Variant of Ketone Reductase from L. kefir
MTDRLKGKVAIVTGGTLGIGKAIADKFVEEGAKVVITGRHADVGEKAAKSIGGTDVIRFVQHDASDEAGWETLFDTTEEAFGPVTTVVNNAGIAVSKSVEDTDTEEWRKLLSVNLDGVFFGTRLGIQRMKNKGLGASIINMSSIAGIVGDPKLGAYNASKGAVRIMSKSAALDCALKDYDIRVNTVHPGEIKTPLVDDLEGAEEMMSQRTKTPMGHIGEPNDIAWICVYLASDESKFATGAEFVVDGGYTAQ

SEQ ID NO: 523 - DNA, 756 bp, synthetic construct
  misc_feature 1..756: note = Variant of Ketone Reductase from L. kefir
  source 1..756: mol_type = other DNA
atgaccgatcgtctgaagggcaaagtagccatcgtaaccggcgggactctgggtatcggtaaagcaatcgccgataaatttgtagaggagggtgcgaaagtagttattactggtcgtcacgcggatgtaggtgaaaaggccgccaaatcaatcggcggcactgatgttattcgctttgtccagcacgatgcaagcgatgaagcaggctggacgacgctgttcgacaccaccgaggaggcattcggcccggttacgaccgtcgtgaacaatgcagggattgcagttcgtaaaagcgttgaagacactgacacggaggaatggcgtaaactgctgtccgttaatctggatggtgtttttttcggcacccgtctgggcattcagcgcatgaaaaataaaggcttgggcgctagcatcatcaatatgagcagtattgctgggattgtaggcgatccgaagctgggggcatacaacgcttccaagggggcggtacgtatcatgtcgaaaagcgcagcgctggattgcgcactgaaggactacgatattcgtgtcaacacagtacatccgggcgaaatcaagaccccactggtcgatgatctggaaggtgctgaggaaatgatgtcacagcgtacgaaaacccctatgggccacattggcgaaccgaatgacatcgcatggatctgtgtgtacctggcatctgacgaatcgaaatttgcgacgggtgcagaatttgtggtcgacggcgggtataccgcacag

SEQ ID NO: 524 - protein, 252 aa, synthetic construct
  REGION 1..252: note = Variant of Ketone Reductase from L. kefir
MTDRLKGKVAIVTGGTLGIGKAIADKFVEEGAKVVITGRHADVGEKAAKSIGGTDVIRFVQHDASDEAGWTTLFDTTEEAFGPVTTVVNNAGIAVRKSVEDTDTEEWRKLLSVNLDGVFFGTRLGIQRMKNKGLGASIINMSSIAGIVGDPKLGAYNASKGAVRIMSKSAALDCALKDYDIRVNTVHPGEIKTPLVDDLEGAEEMMSQRTKTPMGHIGEPNDIAWICVYLASDESKFATGAEFVVDGGYTAQ
